United States Patent Application Publication US 2026/0058010 A1 - sequence listing, part 52

SEQ ID NO: 576 - DNA, 775195 bp, Homo sapiens
  source 1..775195: mol_type = genomic DNA
aggtgtgtggggtcacggtggaacatggggctggcaggtctgtggaggcttggctgacagggcaggaagttgggactttatctagtcagcagcagaaagccagaaggttttagagaaggatgagaggggacaggcttagaaagaagacctgcagcaatggcaaggatgagctgggagtgagaaaacctgtggcttggagactagcttagagggagggccctgaggtatgtatgcgaccaggctctgagagaaggcctcaggcacctccttcactttactcagtggtaacaccagccaacctccctagcttaggcattttctggtcagaggaggcagtgggcattcatgccctctgtgtgccatccactcctggatgtcttacccctgctgtttcttttcattctcccagcaccctgacaggtaagaattgttaccccattttatagagaggattgtggctcagaggtgttattcagggaaggtcacgcagctggcaggtggcagagccaggctggtgtgactccaaagtccctgttctttccaatgtcctgtacttacctgggcttttaaaaagccatggggcaagagggaggtcccggaatgctagattttcagaacttacaggagcctgcgtctaacttgcaatgtgactggaataaagtcagtcccacatattcttggatttatttttcctgaggcattttttaataggaaatatcaaaaggagtggctgggcctctcctctctcttgaacacttttgtttcactctctaggtgttggttactcatctctagactcacaggactggcttggctggtgtggcaagtctcccttaagggccctgctcacttcaccccactacccaccttccgtccccactcagactcagcacaatgaaatagctttggcaacattttagaagctgatatcactgggaaccgagtttcactctggatgcaactcattgctggacaaaaagatgggctctttcttctctgaggcagaaggtactgagtaatcagccaactactgccaaccacagtggagggaaaggttccataagtgcagcattttccactcttggctgctaggctcgtagaaggtggcgtcagatgagaggctggcccttgagagttgttcatactccaaaaggctctaagctgtttcactgacacgaagaagtcaggtaaagaggcaatgccatgctctcttatcttctcttgacaaaaatccaccttgtatcccgttcctcccttctaaatccacaagtatttcctgctgcagccaggtgtgctccacaacgaaaagagcaggcaagtctttccaggctaaggggttccatgtctttcagagacctacccttgggccaggcagaagcaatggcagagggcaggagagctctgcaggctccagcagcaagagggtggcacattcagggctggctggggccccatggtggggacagtttgcagggcacagacaaggccatacacagaggtcataaaacaaaatttatctttaatttgtaagtgtcaacagcagtacaaaagatggagtgatgacaactagattagggtagagaggacagtcttgaggtaaatgagcataaataggcagttcttatagacactcccctaaggggcctgagccccatcacggcatatacattatcacccaaagatggcatgttgaacatatcaggaaagcaccttgtgcaaaaaggaaaaaaaaaaagtagctaaggtgccaacatacaccaggatagataaagacagtgtgtctttcaattttgtcttttcccttaattatgaggcagaggaggggaagactttgaaaagtaccactgaaagattattcaatgttgagctttatctcacgtcaatactgcacaacaaaatccaagaagtttgtgtatgcaacaaagctaagaacaatgattcattcctgtaaatttgaagagattttttttatttttcccatttctttaatccttagcaaactttttattattattattatcaagaggagagtgtgagaaagatgtgatggcaacccttaaggtcatttaaaaactttacactggactgtacaagatttttttttgataaactatttacattttcagactttcaaacatattcaaagcagcaatagacactagtttttatgtttttttctttttttctaattgcccaaatagttaccagccatgggccaagtaggtacctgcattatacatagaatttctacaaagaaaatctgcagttaaaatttgctccaggatgtattaaatgcccttagcaattcaagggccacacccagtgttgctataggaaccaaagcacagtaccttgacaacagagttgcagttgtcccaacagccctacacaaactttacactttgaaacagcagccagcatgtcagtccagcatgtcagtgaattgtgctgattaaattaacatagaatacaatttcacaatatacatcacaaacaaattacaacgtcgggggaaataaaagagttacagtaagataagttatgtagtaacagcttataagcttgtctaaggtaataaaaattttacatggcaaatacaataatgaatgaacataaatgctaagcattctaatttgctacaagctggaggagggtacaataaagactgcactttcaaaaaagcaaaaacacatatgacaaaggaagacaaagggagaatgcacatgagcagacctgcaatgtgcagcatacaaaacagttaaatatttgcacattccccatactccaagagcaccagcactgaggcctcactttatgcttgtggttcttcaggaataagaaactactgagcaagatatgtcactgagttttcttcaagcgttcatattgccatggacactgattagaagagttatctgcattaagcattacctttctgcccccaccccgcccacccttacctctgccccaaaggtaccagcattccaaatatttgttcatgagcttttggaaagcaatctgtccccaaagggaaagatagaatggggatgaaaaggaaatgtgtttgcatatcaatattttcaatgatattagtacaggggcacgctcaataggatatggcatcagaaacagaacatcattggcaggaataacagacagaagttgtttattagggaagaaaacatgtcagggagcagatgacttaaggaaatgatgcaagtgcttttgtgaaaggacaaatgaggtcatacaatattattatactttgagaagtgagcttaagtgccaactcaattcttagacaaacgtgtacaaaatcaggcagggctacagcaaccatttttgtcattttctcattaaaaaggaagacccagtagtaatttcaatacattcctctagctgcatttctttgcagttgttggcacttggtacaggacttctcatatgatttaaaattactaagtgattctttttcctctccctaatgagttggtagaggtcaattctttgcaaaatgagtaaattgagagaagcagcctcagctgtgctgttcaagtgaccaggctgccttcctactgagggtaaatgggctttcctgaaacaatccctgctttctgctagtgcttgtgctcctggctcaggagggtgtactccgaagaagcagcctggcttcagaaggaaaagaaagcagcctttaatttcagccctagagtgatcacgcccttttcaaacaccctcaggctcccgtggggctaatgttcaggggaggccagaattcgacaagctcaatagcactgtgagcccacacctgaatttagaacttggcctgggctttggtgtcaggaccctggcaaatcaaatcaggcctgaggacaaggctggagagtatcaaatacctaatgaagcaaaccgaggtgcttctaaaaggctgagctgggtacacatgaaaacaacaaagcttccgtaccttactggaaaagacactgcttcatatctgccaatgaaatagaaaagttgtcagcctagcggctcgtatccgcaaagcgaccttttttttctctctcccttcctacttttttcctttcttccttcttttctccttttccttccattccatatggctatttttttttttttttttttttgggagaggattgcctggcagtgtcccaattctaagtgacaaggagaaccctgaccctgtaagttctttaacaaaatggagataatttttatttttgatttgaagatactatgaaatagggagcaccgcaaaaacaaagttgcttaacattcttgaatctaaactgacatgacgggacgtttattaacggccgatctcagaggtggatttttgcctttgtagtggcattcatgcttcttgctattaaatggtcacagaactatcttagaagatttatgtagactcccaaagcaaactgactgtctcctaactgtagtggaaatttagtatgtccaatcatcaactttctgtaagaaaaaagggaaatgtctggatctgtggacagtgggttctgaactgcatgagaaccctggtgaaacgttttgctgtcccagctgcaggccaaacactgctctctcactgtagctgataactcactaccccgagaggcacagtgactcatcaactttcagtttggaccaacatctatggatagagaacaaaaaggaaatacataacttatatctcactaagtattcatgaaccaaaaataaattctatttctatgttatatttacacaattagaaaaatctaaaatgagatggtaaagtcatataaactttgtttaagccccactgaaaataaaatgaattgatccctatgattgtcattcttaatttccatggatatttagagccaaacttggctaataaataaactgcttatacacaaaatttagattcaaatacagcattactgtttgatccaatgaaaaagacgtttacaatcagatcattcctgaatagcctttcatttttaagaacatggctaaaagtaaatgaaccccagtactgaggcagagctggagctaaaacaaagtgttcatacacacatgtattttgcataaataaatgaaataacaagacataaaaatgactcaaatccggcaactgtgaggcaagcccacacgagtcgaaacagatgacttttgttcatgtagttttcgtacaacagtttcacattagtcagaagtgataaaaaataccatttatatccagtgcttataacacttacgaaacaacatctgtgagtgtgtgtgttttttgtttttttttacttactatgagcaaaatcaagtttcagtcctaaagaacagtcctttgttctccaccagcccagaatattattttggcatggtcataaaaacaaacaaaattaacctactatgctaaatgtttgcttttgtgcaaaattaattacatacaatacaatgctagccatacaacactctaccaatgcaacaaaataagaaagaagtgagagagagcaaaagcaaaagccaaagagaaagaaaaaaaacaagagtgaactgaggaggagaggtatataatcaaagaaatcagtaagacaataataaatactcattttttgagagaaaaaatgacctcctcctcatttgaaataaatgtacaaaaacaaatttctaatccccaaccaacatgaataacaaagagttcctatcagtaccttaatcagcttatagagagcactcccagctaacagaatagcttgtaatttcttggctagacctgtttattgctattaggccttgagcactcttaaataaatacaaaggtacactattttcttccaagtgacaaaatggctcaagaaatctgatggggccattcctatgtcctggtgatcagattctgggttgtcccatgaggtgaactatcccattcactgacattctcccactaaacctctctgggggaagccccccgatagacaacctgtcctagtttcaggaaggccaaaatgacatggcagagctccctgtagttaggagatggggaataaaacctcactgcttcccaccccagtagcatgtcttcaaagaaatccttgtgtgataagtgcagttcattttgttcacacgtaggcaggtccccatgtggctacagatagagtcagccagaggaactcatctgctgcccccggagctatctgttccccagagttaacagtaggaacatcccatatagggaatgtattcccctccttctcctcccttacagttttctttcattctctagatgtatcatgactatttgccaccatctttgctctgaggctgtcatgtggctttttgcatcctggggattttgcaatgaactccctagatgtgccagctgggacaaggcaactcagtgtaaaggtgccagcccatgacagcttcactgagattcctgcatggcccacgagccttgggcttcaggtttggccgcaggactctcctgcctggcagtcaccactgttgaaccttgctgctgaatggaattcagggggaaatgccactgatgcagaccctaccacttgtgaactgaattaggggaaaattctggcaaaagacttgaggtcacagtgaacctcaggggcatacctgtttaagtgtaagactatatacctatatcccaatacacagccctgcagccagatacatactcatgattaaaaacaataataggtttttaataatatcttggtttcagaaatgcttccaggcgttctggggacataaaatcactatgtacacaggagaaggaggtgaaaaggacggaaaagttcttcggggaaggaaggtgaaaaacaagaattattaaattaatgccaccaacaattgaaaaaaaataaatagcaagtggacccttgacattctggaatgaataaattatttaagataaaatgtgttaagactgaatgtcagggttaaaggcaaagggataatggatgtagtgagaggtggtctcaggcagagaagaccactctgtcgatatctggtgtggcggttgctctggtgtgtgtatgtcataccacatcacgcactgatggcacgtcaacaggcaaacacaattgggtccatgcactgtggcaaccttgttcattccttacaatatcttgtctccagattcctgagtaccttaccattttctggaaaaaaaaatgttggtttgctattttattttaagatgccaaagattgtctaagactttgcagtgtctcctttaagactttcaaaatattaagattcaaaagttacgaaaaagtttggcacattcaaagtttaactctacaaatggaaaattggaattccgaggccttttgaatatgctctacatgcagctgcacacgccgtggacttgttctgtttcacaatatgaaatcctcagttgttttctaaaataattcagaataaaaacacattcacaacctgtaggccggcacagcatacctgagtgagaatgtttaaccccatctaaaacagtaacttaaacctttatcaacatccaaaagaaaaaaaaagtaagacaaaaatataagacttgtaagacatctacgggttgagataagtttcaagtcctggtgtctcatatttaatatgtcttcacctaaattaaaaaaacaacaacaacaacaataacaataacaacaaaaaactcaagttcatgaaaaatcagggaaaacttaatctgtctcacactttacgaaacaattaagaccattctgctgatgtaattgtggagccacaaatgcatgcgggctctttaataactctttgttggggaggggggtgaaatgtcagagtactttaattcagcaaacaaaaactcctcagttggcactgacagcctccggggcttcattttcactgctatagtctgatttggggtcatcttcatagtcatcatacatttccatttcatcctctccattgatcatttcatttccagctaggcttccgccatctgtcttcataccataagtgctctggatgaccgggaggctgggctccgggctggccgaggtgctagagcagtcagatgtcatctgaggcgatggtgtggtagttgccatagtgatagcaccaggatacacaacacctgttcctgtggtgattggaatctgaggctgttgcctatatagattcaagaaacaaaatcagacaagggagaaatatctatatatgtgctatgtacagcattggaattcacaccctacactttcaaaagggagccctaaataaatgttaaataacattctaagcaaataaaatgtgacaaaggtgttccctggaggagtactgcaaatctccttgatgctatgttaggggttaaacaatatgatggagcaatttactgatgactttgcaacataaaggcagggttcttttaacttggtaaatatggcaaagtttggataacacctggcattaggaacaaatgatgtagtgaattccacaatgttacatgtgaaataatttttgaagatctcccagcacattttgaaaattagactagtggcatgaaacatattataatgacactattaagcaggtttgtgtcttcaccttggtttgagaaatgtataaatcaagatgagaagggacctagcatgtcccaaagagtgagattcagcaaagcatttatttgttattcatgtaaatgtctacatatttccatggctgaacttgttaggaataatccctgtggaaggatcatcttggatgtcattactgctgagaccctgggctggaactggggttgggattaagagagttgggagtaaagagcagtgagacctctgcaactcaacagagtagagttgcagagtagacaccagatacgctgcctcaccctagatcccagagggtggcaaggcctggacaccagttcattcctccataatgttaccctagtttaaacaaacttaacagatcctttgtggaggtcaatctcttcctctgcagggagacatgattactgtctcttaacttcacttaaggcattataactggtacacaggaatgaaacatctacctaactcagagactatggcgaaaatattattttcatatatgcaatattcaccaagagtttctcaatctttaatggatagtaaattatagttgaatttgtttcaagttgtcattgtaactatccttttggagcctttgtttctacatatttatacaagccggggtcagggaagttctggaaggtccttccactttttgtactcatgacttcaggtcaattatcacttggacaattcttactcaccctacacattatcactgaaactttctatccatctcactcaaacaggaaaatactctgaatctatgaagaagtagcttagctacctgccattcttttttttgtttttttctgttagctctctcttttttttttttttttttttttttattatactctaagttttagggtacatgtgcacattgtgcaggttagttacatatgtatacatgtgccatgctggtgcgctgcacccactaatgtgtcatctagcattaggtatatctcccaatgctatccctcccccctcccccgacccgaccacagtccccagagtgtgatattccccttcctgtgtccatgtgatctcattgttcaattcccacctatgagtgagaatatgcggtgtttggtttattctttgacatgtccagaggaacataattttctcacaaagacctccatgccctccagcctggcagagggagaagggatgcagatggtttagaaacactctgtgagatattggttcacgctgaatttagcaatctcttttaatcaccacaaggcacatcatatccctaacataacatataaaatattttcaggtataccaactcacccaattaacatcatggccccataagttattattttttccatttccagatgaagaaaatcagaccttgcttcaagccctgcattcaataaccagcagagccagaatgtgaatctaagccattggctgacttgaatcccatcactctttcctttatagatattcaatctacagatacactaagctcactgtatatcataaaaatgcctgacttctatagaacctgtcagcacctagttgacactaagcacttgacattgacccagtttttatgattctcatggtgagttttttggttgcctgaaggaagcagataatagaggaatctaaatctatgtatagaaacatcatataaaatattagttccctcttattgaatcaaattttaaaacagtatacttctggcttcctaagttttgggcaaattaacacaaattaaattttatgctaaccttataatgcctcattggtttttttactgaatttggataactgcaataaaatgtttttgccttaatcacattatgagtgtagagggaaagcttttactgcaatgttaacccattttacagatttcccaatttggcaagctgatctgtaatacaaactctgcataaaaacacactatcaaatgatacgtttccttttcacaaagaatagatggtcactttttgcagtatttttaccagaatatctatatcaataggtctactgaataaatttaaattgagctcgtattatgtgctgggaactatatttaggtgtttttacattatcttcttgaatcctcataataagcctgagaggtaggtatcattttccctcttttacacatgaagtgaccaattaagtttcagaaaattcaagctgtttgttcaaggccacgcaagtaccataatcaggagttgaaccttccccgtgtcacaaattccctagcacatatcaagatcagggtgagaaaggcaagctcacactatcagaaaaaacttagcaatttaaatcggaatcaaaatcttctacactgggctccacatagttcagagtatttggactttaagctggtaatggaatgctaaaaataaataaacaagcaaataaaacatctgtacaatttactttctagagtgagagtgagatgcatgatattcaaaagcctagtcctgggagtggagagatatatatggctgttttaagcccccagacagtgctaaaagccagtgagggtaaaaacccaggggttactccccaccttgaggaaatgaagggagtccagctctggtaaggttctcacattcacatacaactgttcgaggttgtacataaatgctagagtgagaacttatccctgtgagagatgatttttgcctctccaagccttctgggaagaaggttatgtggtatggtgagctcaggttttggagtcagaatggcttgggtttaaatcccagctgcaccagttactggctgtgtgatcctgggcaggctaattattatcactgacattgcctctcctcgtctataaattagaacattcacatttgacaggactgtgaagattaagtaagaacatatatgcaaagcattacattatagagtagacgaaaatgttaattccctttcctttcctcctttgggaagctggtgtaaacctcacagagagcaagcatgttctaagtctgggggagcaccaaggaaatgacaaggtaatgctttggactctccgtgagtgccagcccacagaagccatttggaattggcggttaattgtaaaacaatactctggttcacaagcctggccaggagaggacttcctctttaccgcagaactgtagagaagggcatctgagaagggaaaatgttgacatcttctaagaaatgtttaaaaagaaaaaagtccccaaagaataacatttggttctgtataaccctttttctaaccctaactccctcctttctctaattcctgaaatatttccattataccctctggaactcaactgtcagtccttactgactcaccttcttactctaactgaaacttggctctctctctaggccacgagtctccctaaggccctcggaagagttggttatttgctttccatccccctcacatgaatgggcctggaggtggggtagttcccttcttagctcctcattgcctcgtccaacctactttttaatccctccatcctaaaaatctcatctttgaatctcatgtcaccagactatgtcacccactcatacctttatctaccccctgcctgatcaatccccctcattccttaaagatgttagctcctggctcactgttgctgtttcttcaacataacctctgccatgatccttgatgtctttgctatctctgtagatgttcattccaacacccgactatctcagtgtgacctccccgccactgtgataatctgggcccctccctatcttagttgctcgctctcttgtcatacagtggaccttgtcattttcatctgtcactcctccctaatctcagttttaaatatcccactctctaaccaccacatcttattgttctagttttctccctttagtacccagtttatgatttcactccccaccccatctgaggagctacggtttcctgatccttcaacccaccttcactgccctcagttacttgagcctctccctgcttgtgcccccacttacctctttacccagttccaattccatggttactcactcccttgcagacactctccattctcttacatagcaaaacttcaactttagttcaatttaactctctgcctactctgtttagccacacagctgaacttggctggagaaaatacactgccatacttactagtctctaaatttacaatgctgtacttcaaataggcctctggtgctgttcagccatcatattgcacattgttctagcctactccttctcttagcctcctagacaattacttcctaccttcttaactttcctcaaatatccaacttctccccctttctcactccaagctaatggcctggctttctatttcatggagaaattagaagcaatcagaagaaacttttcacaaactcccactgtcacgttgactggcctccctgtatctgtgccccattctctgcctgcctttccatattttgaatcagttcataatccaatataaggctaacccctctgcttgtgcactgaaactatctgtttttgtttactaaagatatctctccagcaattgtctctcctatctgaatcattaattttttatagaattcccaccaaacatgctataatcactcataccataaaaaacaaccaaaaacctctctcggcacatctccccctccagctcttgcttcatttctttgatatcctttaaagcaaaactctttaaaaagttgtctttcttcatttcttctactcaattctttcttaaacccacttcaatcactcccaatacaccactgaaacagagcttatgaaggtcacaccatcaataatcttcatattgttaaatccaaaagtcagttcttggtcctcatgttacccagatctataacacgggcagcatttgatatagctgatcattttctccttgctgaaacattttattcacttgttttctcagatgccacaccctcctggtcttcttcctaattggctgctccttctaagttcccatgctgcttccttcccatctccctgccatctaagcaccgaagtccccatggattgagtccttgcttcttctcttctctatctaaattgattcccttggtgatttcatctaattccatggctttaaatattatctatatgctgacaacgtcccaatttatatctccagtaagcccttcgctcctaaattctagactcattataatgcttattatatatatatatgagtctagaatttaggagcaaagggctcactggagatataaatatatatctatatataatatagatattatatataacatatcagcattatatataatatatattatatataacatataagcattatatataatatatattatatataatatatataagcattatatattatatattatatataaaataagcatatataatgcttattttatatatatgagcatatatataagcatatatacatgcttattttatatatataactgcttattttatatatattttacatatatatatatatatatatataaaactgcttatttgatttggatttctaaatgctgtctcaacctcataggtgcagaacttaaagtcctgatcattctcccacatacctgcccctctcatggccatcctgttcttggttaatgattacttcatccttccagttgaataggccaatctatggtaactgtatttctttcaaactctgtatccaattgatcagcaaatcctattggttcttcttcaggaatacatctagaacccatctacttcttaccacctccacccctacaaacctggaacaaaccaccatcaactccaatctggtttattgtaagaggctagcttccttgctacaggccattctcccttcagaaaattctcaacatagcatatagagtgatcctttcaaaacctaagtcatatgaaagcattcctctgcttaaaactcatcaatgcctttccatctcactcagggtcaaatacaaagtcttcacaatgtcttacaagtcttttcataacttggttccttattatgaagactatggcttaaaagtcttttctactattcttcctacctactcactttgctcctgtcattctggcctatttatttcttcttggaacaagctaggcacaatctcgcctcaaaacctttacagttgctgttctctctgcccacatttcccagatatctgcacagcttgctcccttccctactgaggcctttgctcaaatgttgctttctcagtgaggttttccatgactgccctatttaaaattgcaccctataagctgaaacttcctatccctttccctactttactttgttctaaggcacctctcactattatttatttgtttgtttgttatttgtttgaattctatcactagaatataagcttcatgagacaaaaattttcactgacatagttccagaactcagactgcttgtaacataggaggcactcagtaaatatctgttaaatacataggatgaatgaatgaatgagaaaaaacaaatgaaaattctaagtaatctatttcagggaagaaaagatgtaatgagactagctgtatgaaaataaccatctttagacgcttgaatggttattctcataaataaaggggagatttgttctaggagacacgaaagaagaagattagaaccaatctgcaaagtaggaggaaggaagattatggcttagttaacagaaaagaaaactttctagtattaggaaatgttccacaaaggaactagctcccttgggaagcagtgagctctctacccttggaagagttcaagaacttagggaagactcctccaatggcttgaagtatataacatctgaggccccttctatgttgcaactaattctgtggatgcaaaatcagaagctaaccatcacgctgatcttgctctcttttatcattatcagcataaaaagagactaaaaaaaccacactaactgtgcatagctaattacagttgaagaaacctggctttcaatggcttccaaaatcttcctccaccctacccatcttatgttttctttactgccaggaaaaagccttaggctgcttcttttttttactattgaatatatccacattttcccccaggtgttcatgctctcctctatgctaaagcaggaatctacttcccataagtctgacctacccaaacttcaagtcccttcctcaagaatgtcccatgcttggccataatgcataataatctctcttcctctgagctttatttgctcttgtctacaaaatgaagattagtagttcattaaatgttatatgcagtgctgtgccatgtcttgtgtgtgtatgtgtgtgtataagacactattatatgctaatctattcatgtatgtatctggcttctccaactatagaattctctgaaactcatgtgtacagaaataatgcctcatgtaccatattaatttagtaaagtgttggacacatagctggtttcaaataggcccttaccaattaactaacaaatcaatgaacaaaataagaaatccagccagcaggttcaagctttgtctatcagaaattgctttcctaaaaagcattttttccttcctttatagatcaatttcaaagtcaaaattcaaacactgcagatttcacaaacaggaatagctggcaggtattgggctttacaaataatgaatgtgcacatcaaaacaacatttgtggatgtttgtaaaagtatatacatgagttgatatgaacagagatatttaagaacccttcctcccagtctaagtaaagagtaaaagctggccctgatagagcccaccattgctacatgacttccaaattacaggaatatttctggagtgtaatctagctttgccaattacaaagtaactacatatttatgctggcaaagccccattgtttgctgacccttcagacccttcaaagtgtataaataaagacaaggaagtttgtttcattaggagataagcctatacgtcacatatctctgtagctgatactgcaggaaggaacagaaataataataatctgttcactttacctattgaatgttctaatccagggtctttacaggaggacaatacttaaaaaagcatggctaatctatgctaatgtaattgtattttataggtgtcttaaataggattgattcgacctctttaaaattaagattaaaatgcaaatgttcaaatcacttatagtacaaggcactaaaataattattgtaatataacatagaatatatacttggcacacagtattatttttctagaataataatatttacttgaatttaaagcttttcatatgccaggcaatgttctaagcactttacaaacagtaagttactcaggcttcaagaagagtcctgcatatgtcattggtattgtcattctcattctacatatgaagaaactggttagagagagattaaatgtttcccaagggcaaggggagagttcagaggaataaagattgccatgtattagttcctacagccaagaaggtgcagatctagtatttgagccagactagtctgactccagaattgatgctcttaaccacaatgctataccgcctctgtgtgtgtaatgtcgtgtccttaccaatgtcctttggtaaaagggacatatgtttcacattcacataagcctggtttacatctcagctcggccatttactagctgtgtggccctacacaaattatttaacatctctgaatattgcatttttcaatttaatagtgagaatgatattccctatcttgtaaatttgttgtatttgcaataatctgtataatccactcagcagagtacacagcacacagtaagtattcaataatctatctttatcattgctaaaaaagtagccccaaatttaatattttatagtagttttacatctgtatcatgggggattggttccaggacccccacagataacaaaatctgaggatgctcaagtcccttttataaagtggtatagtatttgcatataacctacacacatcccctatatactttaaacaatctcattatttataatagctaatacaatataaatgttatgtaaacacttgttatgctgaattgtttaggaaataaacgcaagaaaaaaaaagtctgtagatgttccatacagatgcaaccactgtagacctaactacatagtgtactttagcaataatgtaacattttctcgaatttttttaaaaaatatttttgatccacaattggttgaatccacacagatacagagggctgaatgtacctgcataattctctatgagttcataggtaaattaccaaataagtttcaaataaatggaagtatattcggtcacagttctttgggaagacgtcattgtagctacatgtaccctaatgaatattccctctacattaatagtagagggaatattctggacaccacactcagaattggtaagggcctatttgaaaccagctatgtgtccaacactttattaaattagtatagtaaatgaggcattatttctgtacacatgagtttcagagaattctgtagttggagaagccagatacatacaaacaaatatacaaagccagatacatacatgaatagattagcatataatagtgtgttatacccacacatacacacacacatttattatcttgaataatccagataataatcttatccagattattacaacattctgatacttactctgcgaactgaagaggttaaaaccaaggcaagggctaacattgctcccttccatattattgataaattcatttcataatagctaagtaataaaaaaaactaactcatcagccacagttgtgtagtcagtaaaatgcatgaaaatgttgagcagtatatgcacttttattggcttgaaagttatgcatgtcttttcaaaatcagctataaaaattgatctgaacccattccatcaaaacgtcaatagaaatatttgaatttttgtttgttttttgctcaactcttgtaataacctcatatgtaataaagatcaatttccaaagaaaaacttcaggaaattaataatctatcaactacaactacttaaaagagaatacaaatccttaagcagaaataacacctggctctacatagcaagtattatcaaagctgggcagaggaaaatgctcagcattgagatgaaagaataagacattctgatcattgcctgcacttcagtagccctattctgcagtctaaaatgatccttccataaaggactgttctacactattgagaacaggatacttagtctctaaatttcaaagttctttttatgtaccatataccacaagcagagacttcattttctccaagtgctaagagctcttgctcagatggcatagccacactcatgactgccagcatagggctatgaggcatattttgagacaaagtagtaaagacagttcctcagtcatttggcatgatgggggccaatacctgaatttgaacctttgctctttatcacctttctgtagccatagaaactctctaaaactcaacttctttatcttatttagagaattatgtgacttatatatctaaaatcctagtatacactagatagtcaataaataatagatgttattaaattgttttagttttttatttttacatgcattggtacatgttgtggtattttgatctagagctgttttaatgtaccctttagtaaagggaactaaattcaatagtattactgcaactcatattttcaaataagtattacaccaaggtattaaaacagcacctttagtagccttccagactggcggaacagccccactatgtatcactacatacacagggaacatgactgagggagggcaggaatcacaagaggtcccaaacttaaactttggattgttcaaaagagattatacacaatcttagaggtgtactaacgggattaaaagagaatgtttatcacataatcttaaagtggactatgaattagtatttttcataaatcctctaattatcagctgaatagcccaattataccacattgccctttttagcgttaaacgcattacctttaaaaatgcaaacatttataatacagaggaatttgataatcctattttgtcatgtcttcatttattaacatactgggatcttttataataaagtggcttaagcttctctctacctctaaaaggttctgccatggtataaagaaattcactgatcatctggtgtgatataaaatatggttttctgtgataggaaatacatattaaatagtaatgataatgctagagttcacctttattgatatcgtattaagcactatataaagtacttttaaaagcgttgcctcattggatcttctcaacaatcatacaagatagtttccactattcatttcattttacacatgagaaaacaaaagttagagaagtttaataacttgcccaggtaggtggcacagtcagtatgtgaaccccagaagtcaaactccaaagcccacgctcctcccgaaaacactgcagtgtattgcacagattcatgacccagactacgttcattggctttgttttcttactctatttactattccttttaaacacatgctctgaaaacaactttttgttccacagggttacctcttgagtgcccttaaaagtgaatagctcttggcttctcctttaaggtacctctttttctaccttcaagtgaagctctcttagtttcctggcacagcacagctcctcaattctcctccaacttcacagcaaatgcaacttccctcttgcttactctgcttctctctctcaagctctttcccaagtgtttccctactctgagtccagctgcttcaggtctgtgcctcaaatggccctctggatttgccaccctgctgtgcttctaggtctgggtatgctggaatctacagtcatctgcatccccacttatcctgactactgtggttatgaggggcctcttttgaatgcagacagccagtcagccaagttgaaatttataccagaaatctattacctaatttttaaacaaaatgacatgaaatcagacttgaagatatcaaaagcatgtctagtttctgatttaagcaagaaaatacacattgttactgctcccaccacagaataatttactgcaacaggagttctggatcttatgccaaaaatgaggtcctctaaccaatgtcgaggccaattatcttgtggtagatcccacaacaaaagcagactattgtgattagagtcagaagcaccacccagagaagctggaaagcttatggggatttcttaaggttagtttttatttttcctccctgtgtatctgcttaaataaactaccagaaactctgtgtgtggccactgagcatcttaaattggcttgggagacaatgacaggggtgatcagctgggagtgaactgttccaggtttggcttgatttgagcaaaagccatggtgcaaggcagtgcccctatgacacagcaaagattctcatggccaagccccttcagtatgccacaacctcctctttccctaatctccttcccaaacatactgccagtagccatcctatagttacttaccgcaaaagtaaagcccaggtggctaaattcaggaatacttaccccacagtaaagaactgcctcatctcctgtctccgagacctcatcagttgcttatactccccaatccgaagctttttgccatcaacaatgcaggtgcgtttcggtcggggtttgtatttatagtttgggtacttctctaagtggatcttgcttagccgggcctgctcttcataataaggttgcttctcctggttggacattgatttccagcgagatcctagaaataaaaatagccttaagtacccaagtggtcaaggcaacatattctaggcaaacacaactagatataccttcccatcacttcactcatctgtgcgctgggtggctccaattcccacataccactggctgtcccaactatacttttagtctataacacaaagaacaattttgcgtatgatactttcttgtgttatttatctcaatagtttaagactgatgctactatagtattttaaaatatatctttgctgcttaaagatcattgcctacaccaaggtctttccccatccacctgcctaccctctcaacagggataaaaggctaaacctcctaagcatacttttgagcatgacaggattctcaggaaaagctttgtttgtcctagaaattcaaacatctcccaaactccaagtatctttagtgaaactatcctttgacaagatgtcagcagatgttgaaatcattccatatataaaaaactactgtgcacaagtctgccatggcctaggtaattaaaaaacctaagctctacctaagaagttatagctttagaaccggaagataccattggaattatatataccattttcaagtactataaacgctcattcaaagctgtaccaataaaagtacaaaaattttaatacggtttatacaggaagaaggataagtattcacttctctaatattgtttataaagaattatctaaacacttgatgaagaggggatgtgtttttttacatgtatcaaattgcatttttgtgtctcgctggtgaataaagcggtaacagctgtgcagactggatgttagcgattcttcagtggagatttttcatacataaacaaatggaaaagttgtacaaatattctctgcagccagcaatatcctagtctgctttaatagcacatgcatccctgctctttcctgattgttgttcaaaagttgtgtagaaggcctaagcagataggcttctctgtgttctgctggtttccagcagcttaaagccccaattaacgaagaattcttggtgctcttgaaacgcttgcacttaaaactttacattttaatgaatatacttactatattcctaataattttttcacagaatgcacacaaataatatagattccccacagctgccaaaatggaaacagagaggctctgtgcccatctgaaggcttactcatattgctactaaaagggcagaaaaatatgaaaatcttcaagttagatataaaactgtaaggccagagaagcactgattttttttttttttagaatgtcatttaactagaaaaaaaaaaatgtatgtccactaggaacattttggtttgaaagatatttaaattcaaaataacatccctatgcataactctgaagctctaaaaataaaaaccacacttaattgtaatgacatttagtatccattttgaaattagaaaatcaaaaaaaaaagaaaaacatatttaacatttcaccactatttgatcttatgtatgttttaaatttttcttagaggtcactgcctcaaaatgcctcagaatcaagttaaattatttatacagtgacaaaacatgtgtatctgtgcatgtccagatcactgatatttactcaggttaaatatttattacttttgaacaaaacatttaaaaaattaaaaccacagtttaagtctctaatgtttttcagcttcttaaatggcttcctttgagattttgtcacatcgtgacagctttaagtagagcagtgccttctgtgtttttcctttttaaagaggaaacatgttgactgtaatgctgcatgttgaataaaatatgtttaacatgttgagcacaataattccaagctgtacaatccacactaggcaagctctacactaatagaacaaggcttgagtttaatcctgagaaatagagaatcactctggcaatttaccacaaactgggcctctcccctgcagctcgtgtgttcagctcactgctatgaaatttgaactagtcatatcttattaaaataattgtagatttattttacaagttttaaagtgatcatcagaggcactgttttgcactccatgaatttcataccattttgggtttctagtccttgatgaattctttcagtgggacatataaacccaagaacactaaagcagaaaactgtagggtctatgagtacttcatagcaacatatgaatttaagagaactgcacagtaaaaggagataaagcttgtctccacgattcttgtttagcagtgacctctcaagagttgctaaattcacagtattaacacatactataaatagttttgtctctgaaataagtgttcagacagtcctgccctggcacctggtggatataataactcccaaacctacatgccacattatggggtgggggaggcagacgtgatgacgaaggctcctgcggcagctggctgaccttcgtctaacttgcgcccgccacaatctcccttaggatcctagttatccccttgcttcccaccctggtggcactcatgggatttgcaggggagaagatcagctttagctgcactgctgcactcacctaagattttgctaatgttggagttatgcatgtcggggaaggcctgaaggatttttctcctctcatcctttgcccaaaccatgaatgcattcattggtcgcttaatgtgtggctcgctgctggcacggccgcgggcgtccctgtagactcgtgcttcagccacagtggcacctcctgttggccaacaataatactgctgtagtttagctgcagagccattcattgctttacttcctgtaatgtcagggcaggaagaacaagatgagtggaaagcgttattttgtggataatgtcacacagcttgccgcctgggtcagctgttttccccaggtcctcctcttcttttctaagtgacttcttggaagtagaaggcaggttcaaatgacagttctacaggctcttctgatgtagccctcaaagacacactaagaattaattttgtgtgtgttttatacaccctaccacatttactacaataaatggtaggtgatcacagagcaatgaatgacattaccttatggtaaactttcctgctgtaattcctttcttcaaaaacatgctcttactggtcattttagactcatttgccccagatcacaaccactctatatgtttcccaaaaatagaattgtttttcacaatattgtcttgacctgtgctcttctcactgcctagaagacacttctcctactctttcatgctaaatcccattcaaccttcaatcatgtttcatgattgaatgaattaattcaatgaaaaatatttattgagcaattactataacctaggttttatgccaggtgctaaggagaccatggtaaataaaacagctcctgcttttaaggagctcacagttcagagtaaggacagacaattataacaaagtgggtgagaggtgctacaatactgacattaacagggcaccaaaaaagcaccagatagaatggtcagctagtgcttcctaggagatgtgatgtctaaaccgagtcttcaaggatgaataggaatcaacaagtgagtgggagagggagtaaagtctgatgggaagggtaattcagggtaaaggaacagcacttgcagtgatgctccccaggctgcactcagtcctcttgctttcaggagacatgccccatagtaattattgtttatgtgactatctccctcctttccactcctctcaggaatacgagatacctaaagttaatgattatgctgtacttattcttgtatcctcaggatttttcacataatagataataaaatattcattaagcaaagattatttggttttcaactcatatgcaaaagtcatagactaagaggcatttatttcaagcgtcctgttctatttttctgttgtttaagggtagttctttaacatctatgaaactatgcctaaattcctgatgctatataatttccaaagagctgactctagtaacatactagattgaaagctccctgaagatagggcaagggatgggtcttattcactgctgtattcctaggattcaataaagtacttggcacataggatttcaattagtaaaatatgttatattaatgcatgaatgaataaataaatgaatgaatgaacatagttcttacttgttttcatgcaccctataccagggcgatatactgatgtatactttgtgatgtggcaactcctgaatatctcctacagactgagaacttctataattaaaggtaaagtggtcagactgatagcctcagacaaggcttctaccgcataacaggaaagtctacgcccagaagtttagaagcaaaatatacattaaaaccaacatttctattttctggaaaaagtaaatcctttctgctcagtgaagttattatacaggaccaacatgattcaatcaatctctggcccttcctctctatttttagataccttggttaagtagacatttgtttgtgtcaaagccagtaataaattacaacattatagtgcactattatttagcaaatatggttatcatttactgcaaacaaaagacagtataaaagggtgggattggctaacatgaatttttttctaaacaggaaggagggcagaaaggctactttctgaagattatacaaaaataacatattttataaacagcccttcttttaggcctactagacagaatgatcctttacatgaaaagtcttagatcccaagatgcataactaatatgatacctttttgccacgatacccacagtacattaatttcatttaaaatgcactgaccatacaggataaattgatttcactttatatgggtttgacagccatgtttattgcgcagtgaaatgtagtgtagcttccagctgacaatatccatcaacacagggcaatatgctgactgctgggccagatgaaggcatacattactctggaagtgaaacactcattcagatacgacagtgtcttctcctgaggatcaccatggtaatttatgatgccctcagtgccattactttacaactgacatggattcagcaatttatatactgacatgcattcacataaaaggagacaggtttgtggagaatgtcagatgcaaaaacatttcaatattattctaagttaactgctatgccacaggtgattaacatttgagcctgcttttactgttgtagctttctctccacctctagcaaaaccaaatagtcagcttccatttatttcttcatttaaaatatgtatttcatcgtaaatgggaagttttactgtctcaaagactgacagagatcatagtggatttttagatgctggctttggtataaacattctagattctctactccataccaatagagtctcccagatatgccatacatatgcccaatctctctcccacacatgctgtaccacagtcttcacatatccttcctactctcttctactttaccagtttctacctttttctgaggaacagagctcaagtctgacctctaccctgcactgaccttttcctttcctcctacatcacatattatcttcaggagctgaaggacaaggaattgatttcacagcaattctctgggactcacatgtaatgcttccagaagttgcaaaattcgagcacagtgcacagaacaaaaacatgaattaagaaggagaagaatagaaaatgctttagatcatgtgcacattgcttttttctggtcacctcttctgtcttccagaaggagtgaactagaaatgaatggggacatcctaagctaaactagaaatgttgtatcagatgaaccaagatttgggaagaagagatttacccagggaggccaacatttgaaactacttttaaattgaatctgatacctgatcaactacaacagcgacgtttaacaccacacagattgcaatgcccagatccctttgcaaaatcaaaacttggaaaatgttttcctgtttttccttctaccactcttcctatttttgcccccttcctgtcctatctcccaaatatgtagtactctaacactatcttatgactatgcaaattatgcccaggaggtcactctccttaattagaaagtcaatgaaaacaacaacaacaaaccaaatttgcatataaaaatggtctcacctttgctttcaccaccaccactaacatcctagaaagggagtctatccttccctagatttataatatctgaattaacacctgggtaatgtacagaaaatacagtaatataaaccacaaatgccccacaaatacatattgaaggtttctgcttttctgtcttttcgaagtgactatgccatataaggcttatatggaactcactgaagcatccatatgagtactatgcagaaagatagatgttttcaacaaatatttcttcaatattctgatagaaaacatctcccaatattactttttttttcatttaaagctgacaacttatctattacctgaatttacaatctaagtttgaattaaacttagattcagaattttaagaaagtattagaggccacaaagtcaaaagaacatttagaaagtgtccctaaactttgcttctgaaacaaaatggttaaagaattgttgccgcagtagaaatacatatgattatgtgtgtgtgtataaattcagaaatttaaaaatggaaattatatatctggaaaacccttataaatagataagaaaaattttacagcatactataaattgttttcaaaaggtatactattaatctgtgtatctgaagtctaaaattcactttgttataattaattttaaaaatcagcatattgtatgatttcattctgctccattcatcattaagtgcaaaaaaccaagtatttcattcttaaatagccagtagtctgcatcagaatccagaacttggaatggctcataattctatgaggcagcttcttctccttttaacagcagaggggtcatttgtgagttcagcgtatgatttttcatggaaagcagttagaagcctagacccacagttatgtacctggagacggctttccagctgacctaagagtctttaattaccagcaacagcagtcccaaatgacagttgctgaaaggccaagagatcaacagcaccacagtaggcttcaagggaaagcaaggtcccgtatgccaggagaggctgctctgtacaacttcccctagaaggctcaaattggttaattcatccttcatctcagtttgtgtaaaggcaaactttcggttagattaaagatagttaatctgcagagagaaaatagaaattgccaaggcaaatatctccttagaaatctgtgatttgaatgatttaaagagaagacgaaattgagtttttccaggtgggttggaaagaaggccagtttcaccatcatagcctctggcaatggtcctgaactaatcctggagaggccccttcgtggttaaattccaagggatatcagagtgaatgagtgagtgcctggtgcacatataaagttattcctcaggggaattctagttaattctataatgtgcctagtaataatttatttatgtattaattcaataaacacttctgacacatttcatatgtacccagcattgtgatggggtatacaaagataaataacatgtgcactttgtttttaaggaatttggtccaatgggagaagacacataaattaaaaattacaaacgatgctaacagcggtaatttaaaaatactattagagcagggaaaataagctactaacacaattggagtggacagagatgaatattagggaggcttcagagttgaagcggtgcttgagcagcatcttaaaggagaagtaataatttaccagcaggtatgaatgtgaaactattttgggcttggaaatcagtgtgaggaaaggcacagggttataaaaaaaaaaagcaaaggacattttagggaataaaaagaagctggcgatggcttgggtttatgtaaaaaaaaaaaaaaaggggagtataagagatgaaattagaaaagtaaatagggaccaaatttgctaagcaccttgaatgccaagctaagaagtcttttgaggtttttaaccagaagagtaacatgaaaaaatatgttctagaagagatcaaaatggaaaactaaatgagaaattaccactgaatagtctcaatgattaccagtgaattgataataaagaatagaatagaggaaaaataaagtgactacctcttcaagggcccattaaaacttacattttgtcagatagaattaatgtgatacatgcaaaatattggcgcaaaaggttctattataaaatcaaattctggtaatggcagaatagctcatatcagccctgtcctccaatagataataaatataaactctgaacaaaatatgaaaaaaacccatagatgttgaagattcctgagagctaccaaaattaaacagaaactggagtggattccatcctagaatgaaaggcattttactaaatgaaattctgttttcatagtttttcccatgaagacgctttctggtcttcatagcatggagtggctagaatgcaaatagaaagtcagtttaattggcttaatgtgtcagaagacagagtttgaacttacaggtggctgctgacccctgaacttgccatgtatttggaagactcaaatgaacccatgaaaaacagagctgtgtatctggaaaatctgaaaagagatttcagctgatgccctttgcaagagaaacagaatttgaattggaatcctatcaagttagaaagaattcataaacaccttgggctttccactgaaactccagaggagcaactccttaggaataaattcaatatgccaggactaaggatttgccctaagactaaaaacaaaattaaaaaagactctccctaacagtgcaaaaactaagtttccacaagttcaacgtgtgcagcaggtaatttaactgcttcctgcccccaaagttaaaaattttcagaggaagataatagaatacagagtatctacaatggataatccacaacatacaatatataattaaaaagtatgagttgtacaaacaaccaggaaaatgtgactcagagatcaaaaaataaaaataaaggaagaaaaacactggctgaaaattacctgaatttggtgagaaacatcaactaagaggtttgagacattcagggaaatgcaggccaaataaatacaacaaaaccacacctagaaactagttaaacttctgaaaaccaaagacaaagagaaaattccagagaaaagggacatattacttacggggaaacaaaattacaaataagggctgattattcactagaaacaatgaagactagtagactatgcaacatctttataatgctataaaaggaaataaattcagagttttatccagtgaacatatgcttcaaaaatgaatatgaaatatactctcaaatgattaaaagctaaaagcatgagttaccagcagacaaacaccaaaagagatattcaaggaaattattcaagaggaaaagaaataacactcaataaaaaccagatatacagaaagaaaggaagaatatcaaaaatgatttgtgaccattttttcttctctggatttcactaataaacagctaattgtctaatgtttttaaaagacaaggaactatttaatacaaaatataacatcgtattgtgggacttataacatataaaaaggtgaaatatggaacaacaatagcatattaccacaaaagatgagggtataaatagaattagattgttaaaggtcgtaatattttacgtgaagtggtaaaattttaactgtaaggatactcaattaaggtttcatagtgaatccttagaaaaaccaatttaaaaaaatacaaagaggccaggcaaggtagcttatgcctgcaatttcagcactttgggaggcagaggtgggaggatctcttgaggtcaggagttcaagaccagcctgggcaacatactgagactctgtctctacaaaaggttaaaaaattagctaggtgtggcggcatgcacctgtagttccagctactcaggaggctgaggtgggaggattgcttgagcccaggaggttgaggatgggccactgcactccagcctgggtgatggaacaagaccttgactcaaaacaaaaaacaaacaaacaaaagtaaaaaatacaaagaagtatagctaaaaatctaccagagtacttcaaacaaaagacttaaaaagggattcaattaacacaaaggaaagcagagaggagaaatagaagacaaaaaactgagggaacaaatacaagtagtgaaaaaaatactgaagtgtaagacctaagcccaacagatttaataattatattaaacagaaataaatcaaattatctaattaaaagttagtgatttctctgaatggatgaagagtaagaatcaatgaaacagaaaacagatataataaagacaacttacaaagccaaggttagaaatttgaaaagtacaataaaattaataaatcctaagtaagatgggtcaacagacaaagagagaagacaaaaatgccagtatttggactgaaagaggagatttcactgtagatactacccatattacaaagataaaaagggaatattataaataacttaatttcaataaatttgacaacttagataaaatgaacatatttgttgaaagacacaaactaccaaaattcactcaagaataaataaaaaatctgaatacactgatagctaataaatcaattgaatttataacgaagaacttatccacaaagaaaattgaagccccgaatggtttcactggtaaattctttcaaacatttaaggaaaataagaataatattgcgtaaaggtatgaaagtagaggaagaaggaacacttcttaattaagtttatgaggcagcataccttgacagaggtttgagtgtaagtgcaaaattttaaaataaaatgttaacaaattgaatccagccaaatgtaaaaaatagataatacatcatgaccaagtagaacttatctcaggaatgtaaaattggtttaacatttgaaaatcagacaatgtagctcattacattaacagaacaaagggaatgaaaacacatgataatcacaatagattcagaaaatggttttaacaacattcaatactcaatcatgttagaaatgctcaggaaattagtattaaaaggaaactttcccagtctgataaagggcatttaagaaaaacctacaggtaacatcatacttaatagtgaactaccgaatgctttctctaaaaatgaagaacaaggcgaagatgtccactctcaccattgttaatcaacaattaaaaaactaaaaagctcacactttatatttcgggaggctgaggtgggcggatcacgaggtcaggagttcaagaccagcctgaccaatatggtgaaaccctgctctactaaaaatacaaaaattagccaggcatggtggcgtgtgcctgtaatcccagctactcaggaggctgaggcaggagaatgtcttgaacccgggaggcagaggctgcagtgagctgagatcatgccactgcactccagcctgggcaatagagcaagactccatctcaaaaaaataaaataaaataaataaaataaaataaaataaaaaataaaaagcatacaaattataaaggaataaataatgtcatctgttcatatataattgtttacataaaaaatcctaagggatttacaaaatactagaactaataagtgaattaacagtattgcaatgaacaataaaaaataccaaaatcaatcatatttctttatactagcaacaaacaattaaaaaataatattcaaatatatatttataatagcatcagataataaaatacttgggaataaatttaactgaaaaaagtattcaacacatctacactaaaaacaaaacaacatttgtaacttaaagacctaaataaatggaggaatataccatgttcctgaatcagaagactcaatattgttacaatgtgattgttcccaaatttacctacagattcaaccaaattccaataaaaattcctcaaagttttttcatataaggtgacaaactgactttaaaatttatatgaaaaataaagcagtaggacaaactaaaacaaacttgaagaaaattagaggattcaaactaccttaatgaaaactaaggctgttaaagtggaaaacgatagttttttcaacaaataccgccagaacaagttgatagacacattggaaaaaaatcctgcatcttgtatcacacattatatacaacaattagagatgaatcatgacttaaatcaagaaagaaaaaactataacactcctctaaatatacataagacaatattttagtgactttaaagtaaaatgactcttagatacaacatataaattactaaatatacaagaaaaatgttaaactgaactttataaaaattaaaactctgcttatcaaaagtcattgttaagaaaataaaatgtcaaagcacatactggaaaaaatatttggaacacacatatctgataagaacttgcatctaggatatataaagaatgaccaaaaaaatctaattttaaaatggacaatagacttaaatgaacattttacaaaaaaggatatagttatggccaataagcagatgaaaaggtattccctattattaatcatcaggaaaatgcaaattgaaaccacaatgagatgcatttcactggaatggcttaagtgctaaatgttggcaaggataaggagcaactctaatatactgtaactctaatatactggtagtgaaagtataaaacagcataaccattttctggcaatttcttctaattaaaatgcatatttacttatgacccagcaaacaaattaaagcttctgtcaaaaacagacttatataagaatatgatagcagttttatcaataatagaaaaaaggaaaataactggagaatgaacaaattgtgatatatccatacaatgggatactactcaaaataaaactattgtaactcttagtttaaaaaaggcaaaaatgacaccaaaaacaaaaaccccacaaaataaagcagaaaaccaaccatccaacaaataaaatgctcttttttttgaaaggttcttttttctgtggacctgaaaagtaggtgacatattcaggccattgtgaactcaaagataatctcatttactaaaatgaattattaagaagagcaaaaaactataattgattgcttatgaagagaaagagacataagtatcactattgggttgcttgatggaactgttgacaatcacagtatttcagactacttcattttattaatagaatagttgattttctcctgtgagattctgaagagtcacacaatacatttgatagtcccttacttgggttattagagaaaaatgataccgaatgcattagaaacaaaaatgtagaaggtgaaattttaaaaggggattgaaattagaaaagagagtactaatactacacagatttgatttttcaccatatttatcctaccaaatttatcttaatacaacagaggtccaattcattgtgttgaagtaatggctgatagatgtctgtctatgattatggaaacctactgctaacttctcattcctgttctgccagaatgtgaacttactttcattacaggaaggctgcttggatttcaaatttgatttcttcttgcaaaaaaaaagaaaaaggatttggctatcctagtggtttgtttggcaggcaaaatacattccatggcggagcaagagccttaatcattaaggaagtgaggaagtgatgtgttcatcttctgagaagaagaaatgccagagatgtagagtatgctttgttctctgtatcttttataaaaattacctagatgtattagcaaagagtgatctagtgacaggtgaaatgacttaaggtaggcaaatgcaaaatatggatacacaattcttctgagatagtgattgttgaatatataagagccgatggtacaggaacaaaaggtgaattacctgtggtactttaattaaagtgttaattcttcatttgctgaatgttgaggaaaaccataagtaaagtttaatatctttgttttcatcttaaggttccttagccctactaaaaacaaatccctatttacttcaactgttgaagctatctacatcaagaaattcactaaataaactagggagagagagaggatgacagtgtgtgtgtgtgtgcgcgcgtgcgcgtgtgtgtgtgtgagagacagagacatgaatagaaaggcctagttatatataatgtacacataaaaaattccattgggcactttggaaacaaactttttatttttatttattttattttatttatttatttttgagacagagtctcactctgtcacccaggctggagtgcagtggggtgatcctggcttactgcaacctctgcctcctggattcaagcgattctcctgcctcagcctcccgagtaactggaattacagatgtgagccactgtacccagctaatttttttttatttttatttttagtagagacagggtttcaccatgttggctaggctggtcttgaactcctggcctcaaatgatctgcctgccttggcctcccaaaatgctgggattacagacgtgagccactgctctcggctggaaacaaacatttcattaatcagagtaccaaagtatttctttaaagagcaatttacctttttgatagactaggccagaggtcagtttctaggataggaacaccagctgtgctaagtaactttgcataaaataatatttacaaagtgctttcactgattacattatcttcatcctcattacaatcttttaaaatgtgtaggaaggcagatatcttttcacccactttatggatgaggaaagcaagactcagagacatgatagcaccttcctctgattaaccagttgctggtaatatgaagcagagccagttctagaacgtagatcttctgactttcagcctagtacatcaccccttcaccaaagctaccccaatcactattcggcaatctgaaataactctgaatttcaaagcccaccatttcttggctggaacattattttcccactttaaggatgccacttccctgcccagctaagcacattagaagagcccatgaccagttatgaagttcatgccactgtctaattgttctctgaaatactgccccaccaaagatgcaagggcatgtcgagaaagcactaaggactaaaattatagctgggatgaaaacaatgctaaattaatgcattccttggttacaggattatgagcaagtgttattgtggataagacttctattttttttctattagaaactccattctctttaaaagatcaacaagaggaaccaaagggaattccctaaggtcagctctgaggaaacataaacctctaattcaataactctgctactgctctgaaaaagggctttattattgcaacatccatatggagccaattggacattaatgactaatcaatccctcccctttctattctacttaaagtgtcacaaactatgtttagattagcccatttcctgcttaggattgctcaagatgtcttttgttctttcaggaccagcctgatggaggcagcttaaacaaacacacgaccggagtggcgcaggagttataaagtgccatatgtgaatgaacaaaggggctatactaaagccttttgtggtatttgttaatgtttttcatctgagcttaaaaaggcttaatgactttgtggtgagctgatgcatgtggctcgtggctttgcaaaatgaaggaaattctaaccagtgatataccagtctgtattttcaagagtctcttgctttcagttttgatgcctgtgtttacttttttcaaaattctcaagttatatttactttacacagatagctaaacagagtcctttatcttatttcaactacagaatcccagggcagctgggataacttatattctttattttaatgacctgaagggagcatagagcatcaaacatcccacttattatctatatgctgtatttatacatagaaggagggcctacaagctgttgagcccaggtaaaaaggcatcatttaagtttgaaccagagaccactgaggttgaaataaggcaataacaagttctggcttcctaagttttcaggacaactgggctcaggttcaagaagatgcccttggagaataatgaggctggtaaaaagctggtagactgaataattcgtgttattcagcagcttttggctttaaccagctctacctcctgtcatagactctacatgaaattaagaagtgcaaagcaagatgaagcaagtctcaggagttagttaacacagatactactgaatccatcctctcatttcaatctttatcgattgccttagccttcactatctttgctggactattataaaaactagccttctggctgatattcttacacccagttttaaatcctttaacctccacttaaatacctcctcttaatttcagccagaatgatctgtcacaaatgcaattcagactaggccactgctatatttaaaacacttcaatggctccctcatgcccacaagatgaagttcacactccttagtacagtacagatggctttccgtgacctggccctccaactatggctccagtaccagctctggctactctgcttggaacattttttgtgtcataacactgaactatttccagttctccacacactgtgttgtgtgtgtacatactagggatctgagttttctcctttcctgaaattacctggccatcttgcaatcactcattattgaagactcgtctcaggtattatttatcccatgaaagtcttacctggttgccaggttagaataagtagcttaggctctgacaggtggcaccctatgcgtacctccatcttaacatttgccatattttatccaaattaccagttttatgtacttactttcttttctagactatgtaccccaaaacagtggtgactgcattgtgtcttatccttagctgcttatccttatccccagggtctagtagccaggatggcataaggtaaatactcaaatgcttactaatacagtacagtggacatcttcaacagtgagaattttagagtgagtctctaatgcccacatgttctattagaacctgggaatttctgaaatcagatcttgtagaaatttaatttcttatattctgttaagtgtcatttcttgaaacatctataaaacaataataattttgatgtggaaaatgtacccatagttgcggtgtgggactcagagattattggttccaatcttacttctttgattgactagccatactgtgcagttctgagatgccagcctccctacttctagaaaaaccttggaaggatggtaaggcatgtctgagatttttggaaatattaaatctgaaaactattctaatgatgtagggtgtgtgtaaatatatatataatacatatatatatacacacacacatatatatgtgtgtatatatatacatatatatgtactgtattcaagtaagcatacaatgggactttccttaaatagcagattcattataaaatagataaaacacgctcattgaattagagaactctaacaggagatggatgttaaagattacctaatccatactcctcattccaaatgaggaaactttcaggtttagagagattaaattgtccaagtctcacggttaataaatggcaaaaatcacaatgggcactcaaatgtaactatccccaaatttcacactttccatcagaatgaatttcttcaatggtcagctgaattgtttcaatggcatccaaacttagcttttaaaactcctaacatgactaatttaactggcctctcttcatttcatttgtctggggaatctgtatttcattagaatggaaaatacatattatgggagtagcagaaactaatttttttttaaggttagggttgaggaatgaacagtactgaaaggagatcactcaaggattttagagacaatccaatctgatgggcccaccaatacttcttcaccccgagaactggtgaaagtatttgaaaagtgcctaatatttctgtggtttaaaggattaaaaacactttcacagtttccatttctaattaaaattttctgctttttaatgaaaactataggaaaaagctaatccaacaaaggcaaccaatttagtcagctcatcttggagaaaaacaggaggcagtatggctcagatgccatatagacagatctaggtttgaattgttgatctgatctttcctagctaagtagccttggataaattgttttctttctctaaactgtagcttcatttttctataaaagagagcaataatttctaccttgcagcatctttgtgagaaataaatgggcatacatgtaaatttcctagcacagtgactggaacccaatacctactcactaagcagtagttcattttagaaataggtagcagtaataatggcaacagaagtagtagaatgcttattccagtaccaagaacataggaggtgcttaactcatatgtgttccctttatagactttcctcatacctgggtgatgtttgctatattttacattctattcttcatgtagttactaaataaacccataagttaactgaagaatgcaatttactccttaatggagcctctcttcttcccaaatgctaaaaatatatttcaaaaggttctctacgatatagacgaaaatataatgactaggcataaggctcaaccgagaaagaccatctcacatctccgcagttcccatatatgggaacagaaatcagaccatactgctcatacagagccagaagaaaagaagagaccattatcttgtgaacctacagataggcttttttataaaagactcattggaattatgaaggatttgaattattgactatgaaattataataaatggagggcaatgaagtttcagggacatttgacaattgtttttcttcttccccactaacaggtctgtagctctccagcatggagcagctattatcctgtttattttgtccctgtgtaggatcaaccttcccacagaagagtcagcttatattgaagcaccatgagcaatttctctaccaccaaagtaaaaaatacattgataccagtaagcttcaatttgaatttctaatataaatttaaaatgattgaacatatttcttatgaaatgcttttttccaggtctgagacttgggatattacatttttgttcagagttacatgccatagcctattcccaaatgtagcagtttatagtatacagcaaatgacgatgcattcttacataacttttcccctctggtactatgacctaactttggcatcatcatgtctcaggtgtaaatatccattgaacaaaaacaattaaaaaaaaacccgcactcctaagtgagaggcaaaagtacaagactgatctgtaaggcatcgatcagtcacagtagacagtgaaaatcatacttacttgcatccaggaggagaggaggaaaggaattatttctagtatgcgtttgaatgaaaacccacctaacacctgctaagctttctcatgttataacatggaaagatatccacttgaacatcctctctgaaataatattaaagagagcagaggaataaagtgactaacagatctccaaaaacaacctaactactgcatttccattattcttaacctctctagtctaaatcagtcttgaatgattaaaggttaatgcatatttatttggtggtaaagtccaaattcctcagcgtggtaatcaaggcactccttaatatggcacccatctatttctgtagcatactcaattcaacaaatatttattaattgcaagtgtgtgcaaggctttgtgttgggcttagtggagaagacaaagatgaaaaagacgattcttcccttctggagctttcctatgaaggtctatctgcttaatgtctgtgtctgcttagattattccctcaaatgaaagcttttcctcttctctttgcttatccaaacctaggcttatctccagccacacttctatcaggttttccagaaccattgctgtccacaaagcttcctcctctaaatagcagttcttttctgtttctttaacgatgtacttgaacatttaatgccttaaactgctttggtttttatgtatactaagcttgtaatcccaactacattactagctcttgaagaatataatgtggtctatattttttaaaaaacctttccctccatgcccataacagtatggtgttatgagataatcagtaaattataacttggttgaacatatgggtaaaactgaagattggaaggccatgagtagggacagatcctggttagaaagtcctggttcctagcaccggagattcagtctacagagacccacctctaaagaggctgaaaatagacagcagatagtgagtgcaggcagtgatagacaagcagaaccaaacaagaagaggaatctagaaggagatattaaaaaacagtcatgcattgcttaatgatggggataccttctgagaaatgaatcctttggcaattttgtcattgtacaaacatcatagaatgtacttaccaaacctagatggtatagtctactgtacacctaggctatatggtatagtccattgctcctagactacaaacacatacagcatgttactgtactgaatactgtaggcaatggcaacacaatgataagtatttgtgtaatttgtttaaacatagacagggtacagaaaaaatatggtattgtactcttataggaccaccatcatatatgtgggccatcattgacttaaatgtcattaagtggtgcatgactgtataagaacaccttggttaagaaaagataggaagtcagtaacagaaactgggggaggactgggtgggtactgactctttggaacaagttagaaacacagttatcagaacatgaagaaaaggaaacggccaattgatcaaagtttggtctcaattccaatcctgaccttaaacagagagaatttaaagcacattcataactagcttgatgctcattaaatcccattaccttaaggttaggctgaattccacagcttgcaggtagaaagtcaagtggctcttactgccaggagagaagaatctgggcaaggtccacaatctcaaaagctacagtcagtccaaatatgtcggacagaactctatcagtcagggtttaatctaatgtgttggtttatgtgaagcagacatacatactgctgaggaagcaagggctgattttgcagtcccatcgggaacatatgctagctatccttgtcttgggtttaattttcatggtagatagtattaatctttcattgctcagttgctgtagcaagttggagaagtacagtcattactcagtatctgaaagagattagttccaggaccccctacagataccaaaatcctcagatgcccaagtcccttatataaaatggtgtagtccttgcacataacctatgcatatcctcccacatacctgaaataatctctagattacttatgttaccttatacaatgtaaatactatgtaaataattgttacattgcattgtttaggaaataatcacatggaaaaagtctgtacatgttcagtacagacacaaccagccattttttgtgtgaatattttttatctacagttgattgaatctacagatgcagaacttgcagatacagacggcagactatatttctatgtgattcagtaatgacatagacagttatttcttccccagggtaaagaacattcagtcagaaaagcagatctttttttgtggtaattattcacactgccattgacacttctttagaaaaggcagcccaatgagaaaccagctatccagtagggctagattcctcactaaagagaggctgggtctttgattgggctttctatcttaagcaacaataagcagcaggttgagttccttttatggagtattaggagatggagttatacaagaatcttgacatttcactatcttgccccatcaggactatacatcacttggagggttcaatggaaattgttttctaccaacattaaaagttatttcggagcttttaagacacagcaaatatatttctttaagagaagtttatttgcttgtttaagagagctgcactttatatatagtgctgatataaactggtgcacaggatcctctaaaactgtttatatccacagtaaaatacagttttgtgatactcatacaacagagttagtccagagcccagggctttgtcgactctgcttatatcccagcctgtgtggctgttactccttttcaccaggtcttgggcctccctcactacccatcctggcctcagtcaccagtctgctggttccacagagatgctattgcctattcatttctctgaaatgcctggacgccattttgggtagctatggaaagccagacccatatgcccacagcatagctctagttaatgttccctctgatttacctgagtcttatctttttacgtgtataatttctcatcttttattcctagtatctagtagttggataccttcttgggcaaaggcatgtcatctctgatataattacacaataattgtatttattttgattattgcatcatccctaattgatacttattatactctagttgccttgaaggtgaatggtttcaattatatagcagtaaaataataaagttttaaaaactgtcaactagaaaccatctagaccaacttcctcattgacagatgagaaaatttaggggaagaaaatgacttgtcaaggatggaacaaccagaatttaagtcttctagcccttaagcaaatatctgaaggggtgtcaaatcaagaaatgataagttttattggtagggtctagaagtcagactagaaccaatgagtagaagttacaagaaagtgaggcaaattttagttataagttgttaacaaacagctaattgaattaggacgagcctctcaagaagtggccagtattctgtcttcagactctcagaggcatttgaacagatgtaaaacgactacttgtcagggatatgagaagtgatttcttggactgaattacagatttgatgacctctctcctttatttcaaatctgagaatccaagagttgcaatgtgaagcactatattctggtaggcttgaactaatgatctttacattccaaagtatatgcagttatagcatttaaatcccaccccagattaggctacagtttgcctctgctgccttgaatgagtcgtgtatcatagagtcaatcttttctaccaggaataaggatctagggagggtaggggaatgaggaaagcttcaacaatttccaagtatatggatcaaagaatgagcaggatttttaagagagggcattcatattaagcggtgtgttttaaagaaaagaagaactattacaatctctgctatttgtcttaaacaaagagcttaagccgaaaataaaaaaaatatcctgagatataaaacttagaagcagttggagctacacacacacacacacacacacacacacacacacacacacacacacacaaataaagcttcagaagggtaaggtcatcttggctgtgttccagttcacaaattcagtataaatctataaaatgcttctgaagaaatgtgagagcaatagtcccaaaagagggtattcttggtacacatatctatttccatttgaatcaatgcaaagttttaatgcatggaggacagcacatcattccagttctgatccagggtccaacagtctggccaaatataatccctttcagagctcatccataaatgctaggcttatctttcactatgccccaaatcaaaatgaggtacaacctcccaaaaaggctgggacagagtaattgatgtgaaaattgttttaaaggtgttagaagaatgttttcttactcaaaccatgcagcaaaacagaaacaaaagaaaagtacccctttagaaaccccaggtataagagaaaaaagaaacaggatggaaagaatatatttaaaaagccaagtctcaactattgttgctgggggaaaggagagcagagagaaagaggagggagcccatctgtgaaaggtaattgggaaatactactggagagatcttctcattaataaaaacaaaagctcaaggaacatgaaaactcaattcagcaagtggcacaaatacaacctctaagccattactctcctcttttacttctctaaaaaaaaaccctaaatggaacctatgatagatagatcatctttctgataagaaattcactcagtgttttatcaagattctaataataatcgcagacttggaaaggaccttagatgaagtcaaatccaacataccttttttaaaagataaagaaacttaagcccagaggttcttgtttttagtcatttagcaaaggaacttcaactcaaatctcccattaaacaggctagaactctgtctagtctgtaggcaaccttgaaattaggagagttggaataagaattgcactcttgcctaagcagaataagaaaaggggaaatgccatacgaaaagtccataaaaagttcaacagctgttcactattcttaattatatggtgacagactcaactaatcaagccctctcttccttacatgtcctacataggagctaacaaattatgtatactcaatacatgttaagacttcaactgcttcaaagtataacaaaaccttaaacatgtttcctaagtccccggcaccaatgaatttgtagttttataaatatcatggtgaacaagaaatgctgtcttgtcacattcaagccaaataacagctggactttaaaaataaaattttgaaggcatttgccttttatatttttaatttctgttttccttgcctatggttttgtcatatgattttgatgagtggttaatacacatccacagctgcctcttttggtgaccttttcctcactgcctccaggctcagggctatgaagcatgtctacaagttgcttactaagtgatattgtcattttcatggctggcagacatttttctgggaagcctggtggaagcagggcctcattttctgggctggcttactttagtcacttcagaagccccataggaggatgggtagacatggggggagggcatagccccttaaaattgctgttccaaagccagaggaaacctgtatggactgagggagaagacatcctgggccagaggcacagaacttacttatcaactcagcccggctaaggagctctcactccaaatcctctatacagcacaaagaagtcctgatcttcttagcacttttctccatgataattatgtatgtacatatttcccttttaatcttctgtctttcctcactagaccatatgtttaaagaggtcaaggacatctctgctttgctgcccatcgtttgttttaagtctagtttaggggctggcacatggtaggcactcaagaaatgttggctggttgtttttttagaccaaagactaagtgaaggagcaaataatttttttagttattctgatactttagtttcttcttaatcttactgttaagggaaatatgaaggaacgaagtagagaaagtatcatatgtacctgttatctactctgactttaatatgaagtgtaactccagcagactttgcaatcagctcagccttgaacagatgccaggatatatcctgaagtcagcagaaggctgctacccatgctagcagtcctcacagaagcactgcacttcggtcggtattagaacaggtaacttgactccattcgtgaacccccaaaagcacatgaggtctcaatggcaacttctgggcaagcttctaaagggaggttttcacatgctccttaagctcctgggccactacagcccttctactatgatactcatcaggcactgctgctatgtgtgacagagtaacatgagagctggtgtatggcatgacttgctatatttagggcagaggaaatgggctgtactgaggaaggtcacaaggagtttgttcagaaaaatgaagggaccacgtgtttctgcataaacagtgggggcagtatggcaggctgctggggagaatctcagctctacccttaatatgtggctcatagcgagtaatttaattattctcagcctcagttttctcacctgtaaaatggaaaaagtaataccttcttcacaatgtgtataaggattaaatgagaaaatgtgggtaaaaggcgtaagacatcctctagtatataaacacttgataaaaaaagttttctaaaaacaaaacagccagggaaattggtttcaatctagacaatctaggcattgaatagaatatccaaaaatatttatatgcagtatgtttctctagagttaaatttttaactttttcctcttatatagttaataactctgaccatgatttttaacttaccaagcacatgatatcactaactaggtaatgacattactgagagataactgactatatttacaccaaatatgcagttaaggaagcaaatgaaaaagtgtgaatgacaaattagaaaagtctttgacagcgcgggtaaggtgacagagctctgtaactaccagtctgttgtcaaataaacagactgaatactccaaagtaatgaaaaatatttatttaattacatatggtcaacaatttaggtactctgcagtacaatctcccaataaaattgagatgggccagacctgaaacacttccacacaggcttttaggccagccacaatctctgtgttgcactcggatggttaactgtgcaagtaacatcatttggacttcctggctccctaggcagaggaacctcaacccttatcggtggaaaacctgcacttttaagtgcctatgaaaataatgggctgttgatacacattcttcaaggaagacagcaagcatatttctggttttgagtaatctttatgcctcccttcctatctatcctccctcttcttcgttcctttccttcctttctcttctcttcccctccctccctccctctttactcccatagacacatatacatcctaatcagaatttattttaacacctggtctcccaaactatcatcaaacattagtctttcctactagtatgaaaaattagcattctgaaaaatttctgaagggcttcctaatgtctaatactattcatctctgagtcctcattccagggatttctgggctgcctgggatggccccaggctctcactaaaagccatgcccagtttagatgctgctatgaagtgtcttcatgtgttttcgagggattttagggtcctggaagaaaccctgccagttaaagggatactagtgagattcttccccttaagctaaagaaggactttagctgggacctgagatgggtgaagtatcatgttactccgaagagaacaaattaatcttccctgactggtgggacagattctgccaaaggaacagctaatgggaaaaccagtctctactctgtgatgacacagtaaataaccaggcaacattactactgaagtgctgacctaacccataaattgtacccagactctggggagcaatttctgctgatgtgctgcttgtgcatttaaaacaaacaaacaaaaagggaaaagaagcgaacaggcattgatattggtgcgggtaaacattctgagaggaaggctggtctttccacccagacttctgaaagacgttagtgatggttagtgcataggcacaggctgggccttccccaaacaattattaagtttatgctaaaactgctgcaaactatcatttaatccccaaaatggtttgattgtacctgggaatcacttgatttggatatgctaaatattctgatttgatcattccacaatgtatacatgtatcaaaatcactttatgccccacaaatatatacaattattacttgtcaatgaaagataaaataatatttaaaagtcctcctttctaagttttccctttttaaatacaaatgcagtgagatggatgaaacacagaattctgctgttcattgaaatgtagaggatccttttattttaaaactttgatggtaacttgaagtacttggattgctaagtattcggtaatgtaagatctaactgcttcttaaagtcttctactataatgcacaacataacttacatacatacgtagttgaagagtgacatttcctttgctttgcctaagaaatctagtgatgactcctatgaaaaactataaagatcctatatctagctcagacacacatttggaaacacatggagcagcagaaaagaactagagaaaagccactcaccctctgcatcttctggccgagtaaggtcgatgacacctgggcccagttttccatcttcatttgactttcccgttaactggggccccaaattctcaaagcgcgttctttcctagaggaacaaataatcagaggcttattctagtttccaaaacagccaccatttccttccagtttctatcttgcttaatggccaaaaggtgaattcaaaaatatcatttctgaccaatgtggactctgaaaatctttcaggaagattccgttgaaagctgtttgtgacatggacagcactgacagcatctagaccatagtacctgtagggaaaggaaagctgtgacagggaacctgccagagcttctatgcatatcttctctctgtcggatttgctccagtaatctaaaaacaacgcaatagagagggttgagccaacaatgcaaaaacctgaaagagcagttcttattaaaatacacggctcaatttaatgggagaggaattttctcatttagagatcatagtttgcattggtattcctggggaaatacaaatcagaattttatgcacgaggatttcaaaaacaaatatttcaaaccaggccaaccagaagatgattgatactactattttgtctcagaatttcaactgtgattttctgggaactgaaaaggaggacatcactcctagccagccatggagccaggaaagttaaatacccctgctgctttaggagggaaacccagagatgttttacttgttcaccagttcttctaggagtaggagtctgaagcaccacagtgaacactccctctgcagctctctggatcagtagcagaggggctcattgaccatcattaatatggtgttcttgtctgcagaaaaacagctcatgtccccctctcgtctcctcactactctcctgactcaaacttggctttgtgttgtgcttatgaatgaatgaaaccttgttgttcattactatgaaacaatattaaatgtcatgtcagcttgaatttacagacatgaaatagcagcttccagctccgggaatggtttctgcatgttatacttaatgcattatgcagcagtagagtgctgattgctgttcagtctattgttcaatgacctagttctgtactgagcatgttcggcattagatggaaacactctgagtgttctcttctgtaagatgtttagaaacttggaaatattcttaaagagcaaacatacaattacttgatagagtctctgcctcatttgtacagcctgactacatttgtgctttctaatatgattatttttgaatatcattatatttctataattaattcccatcagtcaaattgtgcaggaagtcttccagttccccttcgtcatggaatatgttgaaatctgtgttggaagaaaacacagcataaaccttgctttaatctacaccatttctatgaaagatttgcaacaaaaattacaatcacgagtttccctaactgggtaatactcactagtttaaatagcagtatgtagggaaacctctgaaatatgactctcataaaaaacagaatgaaaataaaaaccaagttaagtatggttccctaatatcttcctatgtgaaaatactggtgcacaagaacaaattaacccagatgcaggacacaacaaaaagcaactataagccttgtgggagcttcagacgcagtcagggaaaggacagctgcttttaatcagccaatttctatttttgagtagcactttggttgtcatgatgtaaagaaaaagaattaaagtggagatgagtagtaccagggaaagcaaaatattcaacctttgttttatcacattgtttcgcatttcaaatatttgcatgtgaatgctttccctatgttaaatgcaaaaggagttttgatgtgacacctgcaatcttcttggaagaacaacctttaactgtattttcataggaggaaaaacaactttctctgaaaatcaacagaccgtgctatctatcaatatgcatatttcaagtatctttctagtcactcattctctttgattttactggaaaatattctcagtaaaataaaataaaataaaataaagttcctgaaagaatatcaatattttgacaaggaaggagaagagggaaaattacatgccatggtttgtaaaatcctaagacaacaaagcttacatgatgataatatcttttcttttataaaaaatgaagtgcactcacaattcagtagtatcagcttgtttttaatcataacaaaaaacattcagaacattcaacaacacattcacagtgtctttgaagtcatacatttttctaacttcattgaaaaaaaaatcttctgcagagatactttccctttaaaatatcaatattttgacagagtagaagtcaaggaagaatatcccatgaaacacttgttaaataggaagaaaataaatcaatgatagaaattgttttgggcagtgggttgcattttagatttggtaatattaagcacttgtgtttgagattaaagaaggaccctgcaaagccatgccatttcatataaatttccacctagtctcccagaagatttcgttcttttcttcaaagaatagctcagaatatttatttgccagccacataaccataagataagagggcctgatgtctacaagttacgtctgggcagctgagctaagcaaagattttaccagtgaggttgaacatgagcctagtaaatacaggatgtggacatgggcacagagagaagtataaagatactttggttccaacaagcttaaacttctgtcattaagcatccatgagcatgcccctatatggaacaaatatagactgtgggtggcaagttcttaagtccaaatttccacacacttgaactagctctcaccatatacatacctcccaagtaagatatgttggagatataagcaaaatacctcaatgctaatttaatcccaccccttccaggaaaactgccccatcttcatgttgacagtggattttacatgcagcaatgtgatcagacacttacttatgcattgtcagtcacaaacatgcaggcaacataaaagttattgaaaaaaattaaagtcagctctgctgtgttgtaggactgttggctctctaagtgctttgaaattatgatgtatgaggtagatgttgcatattaaataaagatatttaaatgataaagccccctttagtgagagctgatgaatgttaaatgttacaagccacaagacggtagcatccatcatcttcacgtattatcagagtcaatgacggggcagcctcactgatgacagatagactgctgtattattatccctaatttccagagtcactgaacaaaccattcaactcttcgggcattatttttaactttgcattaaattagcaacttttccctccctaccatggcaagattgatcaattttgtctttgcatgggtggagagagagaatgaatttggggtaactaaaagaacagaggtttgttttcatctaggaaaaaaatcaacttcctcttactggcatcaaatgtaaaattgtgatctggggaaagaacagcaatgaaacagtaagcacacaataatggcttttctttgcacttagataaaagctgaatttttgatgtgcacagtatattttaataaaattttatatactatgttttatacacttattggctattccataataatgtgtgtgctaacagtaaaattgctcttaaatttatgtgtgttatttatacgttcccacgtaacaatgctttttgttgtaaaaaatattctgtttattaatgtaactttacaaccactgcatccaagatccgtggtaaattaatgacatttttattattttatagtgtcattaaatttttactgatcactccatcaaacagaggcagtaaagaccataatgtaaactgggacacttagatcaggcagcaggaagacattccatatagtctgaagaaaacggctagcaataaatgatatttataccatctttaagcatgtgagaatacttggataagtttggcaaaactgtttcagtagtagagtggattgtgtacttaaataacagtttgcttgccagagagacaagcctttttcaaaccatatgcgaagtgactgattgcagccatctcctgaaaaacaacacgtgaaatgtaataatgcactgggtccctcccttctgcattaccaagactgaccagtgtgtaccaggcctcaaattatttcaacatggtcccctttgccacaaactgaagtggaaaatggcacacgctgagaggttttttgtttgctgctttacaaacaaatatatttcatttaagtacacgtctggtcaatgatgtggtatatttcattccaatggtctgaatgagaggtactttactaacctttattcaaaagctcatttctaaggagtgtctgaatatgggggatcattcacggcagccatggaacatacaactaaggggccattatctatagcatagctaatacaggtaaaaaatgattatctcatgttatttttatgtgtaaaatgcattataattatgatactctctacattgactctcttaaataaacctaaatctgtgttatgaactaattgccaaatactctatttatgtatatataagacagtaaataatttctatgctcatataattatggatttagaaacacctaatttctacatggggattctggtatgattctttcttaggtaaataaggattttgttgttgcatcctaaaatacatatttaaatattaaagacttaaaaatctttcaaatgtggaatgataaggaattttgcagggaaggttaatactacagccccactaatcgtgttttgtgtgtattcctgacgcagaattttctaagaaaaataacaaatatatgtattataaataaaagttctctaaggccatgacaatattctgagatgatatcttatcctcagagtttcagctatgtctaggttattgagtggaagctaaataagtcttgtcgttttcatcctagctcttagcttcaatttttatgaaagtttgatttccatttgtgtattttgatgtatttccaacccaggaaaactctttcctaaactgaaagtaaagactcccctgcaaaagcagctttctctttacccagcttcccctcctttcctgtgttcacattggtgctgaggggtcagtgtgatttgtctcactgcttttcttgcccttctctgtccaggcgatgatccaggcttgctgatttttcttccacatagcctcttgccctcaaccctctctcaatgccctcctgccatcactaactaccccagcacatgtcttcatgcccacacacctatctcactgctgcagcctcctttctgatctgcctgatccttggcactgtcctccccagtccttctactcacactcttcacagagttctacttcatgtctctgattcaaaaccttccgtggcttcccatgtctactgcatttcctccaagctcctctacatggttttcaagatctttcatacactgctccccacacacctttttaaactcaattttctacagttctcctgtcacatatcctctggttgaggttggcagtgacttgcctttcaataataataccacgatcatccttccttctcgtttctccttcgccaaatcctattcatatggaaaaacccaagttttccatgaactctataaactctctgatctacctactctctgctatacaaaaagtcttagttttgcctacgtaattagcccctagttacatactatgttaaagaatcggacttttggttcatgtgcaccaccaagtctccctcgacaacatcaaaagatttttcaagccagagattgtatcttagaccttttctatatatctcacagaacacttagtattagtgttcataaatacttgcaggtttatataaggccacataactaatctagccacataaatcaaaaacatgctgcacaagtatctaaaagggcaataataatcaaaacaaggaaattcagaaaaacaccttaaatattttataaaagaggtaaataagcaattttagaagagcacaatagaaaaatgcaatttgattatataatttaatgtgaaaaagatattttgagtttaacttggaatttctgcagattaatacaatccatctttgtgaagtcttcgcaaaactctggcaaaagaagatactacatatcatagatgcttggcttaaaaagaagtacacatttcaaaataaaaggtttgttttgttttgaaagcaagacaatgctaagtacaatgctaagagatattctgtctcttactctgaatgactttctttaattccttgttctagacgtatcttgccatgctgtgattctccagaaacatcacttaaccagacatgtggtttcctttttattgacttaacaaacactgtcactttgttatactttattttagatcctttattatgcatttagtaatttaatgaatgatcaaaaatgtaggctttacactggaaagcaaccacatgtacttttaaaggtgattatattttgagggaattattttagaggtataggacttactttcctagtgacattgtgatgtttctagagtaagtaatcatgataatatagactttggctggaggaaatgaggttcattattgaacctcatttttaaataatattttttcagctaaagctattaatttgtctagtttctcatacatttttaacaccaaaattgtgctagcacttaagaattagttacggactaactgctgttttccaactgtgtttgccatcacagcataaatatatctactggtgtagaagcagggaagaatgccacccactgatcatccacaatgtgcaaagccctttccaatgagtacttcctttaatctcataccaatactacagagaaaatactattgttatcaaccagaagaaggtgaggttcaaaaagaatttttatatgggttaagtcatttaatcaaaatttagatatgtatttgtactggggtgaattttgaataataactctagattaccatgtgatctctctgagcctgttcccccctttgtaaaatggaatagacaatgctcatgccacaagggcttaatgattaaatgagagattatacatgtgagtgctttgcaaaaaatacagcaactcataacatatccacttctgttaaagatattacttaatgttgctaagtatctcaaagctaaactacgatgacagtgtccttatccaaaggtcaatatcctttctcctgtatcaacaatagaacaatacataaccaaagatgctttgtttttccttccttccttccttccttctttccttccttccttccttccttccttccttccttccttccttcctccctccctcccttcctctctctctctctctctctttctctttctctctttcttttgacagagtctcattctattgcccaggctggagtgcagtggcatgatctcggctcactgcaacctctgcctcccagattcaagcaattctcctacctcagcctcccaagtagctgggattacagtgcacaccactacacccggctaacttttttgtatttttagcagagacggggtttcaccatgttggccaggctggttttgaactcctgacctcaggtgatctgcctgcttcagcctcccaaagtgctgggattacaggcatgagccactgcgcccaatcaatgctttccattttatcttggctgctaagtaactcagaagtaactttaaatctcaaccttagtaaccatgtaggagctggataattattcactacttttaagcactcaagtcttccttcacctgtatgataagaaccaaacttctctgtaaattatgcatgtctttttatgatctggctcctgctccctcatcagcttcatatcctattcactctagtttatactccctgttacaataaaatggaatttcttgtagctccctgaactagctatgatattccaaaatcctatgtatttccgaatgccactttttctttctaattatgatgtcttcccttccagatgacatcataattagtcctttctaagcctaattaaaacatctgctctggacaaaatcctttgttgacttccttccaccagccctgggaagaatctatcatcccctttcctctaacacccctaacccctttcctctaacaccaaatgtggtgttccatcaccacatttatagaaaaatatatattacaattattggtttctatgtctgtttccagttctcctcaacttgctcctcaaggtacagtatccatgtcttattatctctataacataagtgcctctcatgatgttgcacatactaggctctctggttgttaatcttggtaatcttggtaaaattgcttctctttcttcttccattttaattttacttttaaataaaatgcaattattttcagatcctatttaaagcagtgaaatataaataattaaaagacagataaatacaaaggaaggtgtgtaagtcaattaaacagtagagtgatctcctggtcagggttggcccagagctgtgatacagaaaatctgccttattattatcactagaaagggctctccaagaagaattttccctaaaatctgaaccatctccacaaaaaatatccttacacatctcttacattgcttagcaattcaccattagcaattcattctttgaattaattaaaaaggccaatctcttatgaaagggtaatagaataaactgttacaacagaattatattaatttcaatttaattcctcctgagaaacaagaacattcctagggaagataatcctggtaaagccatgcaaacaaagacattggtcaagggagatccttaggcactgtaatcccagtgaaataacttcacgagatttggaaatatccaagctgagtaaatatggttgttatgggctgaattgtgtttccccataattcataggtacccctagtacctcagaatgtgactgtatttggagacggggcctttaaagcagtggttaggttaaaatgaggctcttagggtgggtcctaatccaatctgactggtgtacttatacgaagggtacatctggacacaaaaaaggacaccagggatgtgtgcacatggaggaaagagcatgtgaggacacatcaagacagcctctatctacaagccaaagagagaggcttcagaagaaatgaacctgctaacaccttgatcttggacttccaggcagtactgtgagaaaatgaatttctgttgtttaagtccgctgtctctggtagtttattacggcaaccctggccaactaatacaatggcagcttctacctcttatgccatgaaaggtgctagttgctttccaaaattatcaaataataaagcagcatattttagagataaggtcctattagcctcacaaacaattatctagaaacttttttctttaggatctagtagcagttctatctgttgacagccttgtccatccatctatatatttatctatgattcttcaaaagttgtcctttaaagggaaggaagcacttaacaaaggttttcaaaaacaggaagatttatacttgaggcaagaaacagaatctcaatgctataagctgttgagataaactctaggaatgctgatatatgccactggaccataagcatttcgagggagggaaagtatctcacgacctgctctatgcccagagagaactgtgcgctgcaagcagagaagcatgcagcacatgcctgctgaaatgaactaatgtctgcagagcttcttgtggagatgttttatggacctttcaaaaacattctccaatgatgtatgacaagtttccctcaggatttgaagagtactccaaaataagcgagttctgtctccacacccccggcaaggacagcatcctagacatctcctgtaacacacatttagactcttgtcactgaccatcagatgataaatgatacagtagcattaactctgaagatatgagacccttttaggcttggaagccactgaattaaattagtttcatcaggattatagtgcttactgaacccctttaaccaaatgctttctgtctcattcatatggttttaatatggttttaaccaattgcaaggttatttataagtttgcaactcccaagtagagttataaagtgttcagatttaagcaaatccagttgtgtggcagcctaactcctacttatatgtggtttcaactttttattcgtgtacagaggcatgatgcagatttgttcctgaatattctctgattaaccatttgtttcagtaaaaagttcacaaaaagtcccactgtaaaattacacaaactcctattaaaactgaacacatggtttaaaaagtggagaattctatctccacctaaaccaccaataagatactgttattctaacatgtaccatatgaacaaagagtgtcacaataaaattaatgaccagctaagcaaatgtctttgtccaaaaaggtatcttgggaattctattagttcaaaatctaagtgcctcatctgaggtacctgtttaatttataatgtgtactttttagtattatttgtggaaacacaagtgcagtttattcaagttgaaaacatcaaagctatacgaaccaagaataaatattttctttagaaatatagcttccatttcagttttagctggaaaactgataaatttgaagatttttttccctcagaaacataaacacaaaaagtgggaaaatgtaaggtactgctaccatgtatttgttttaatttatgatatatataagcatattgtatctcctaagagcttttcctataatttaaaaaaatatgtatgctgcacaaataacatatatcttaaaaagaaaaatagggagcatgagaaagctttagtgccagaaggaaatgtaaggcctcttcattcaaacagcaatgtgaccaaggaggtgtggacacttaccacagtcctgaagccggctggtgacagatccagaacatgcctctcagctccagactctcagtctcctgctccttccactgagctactcttactctaccaactatgctagtccctgtataattcatctgcaaaatgagggagttaagttaacttatctccatggtttcttccagctctgaaatcttatgattctatgatatttgactttctttctctctaagatctatactgcagcacacattgataaaatcacgcctaaaaaaattctgaggaattattcatctcaagaaaagcactaaaaaacaatgcatttttttcaaacaagcctaccaaagcatggtcacccttagccaaaaagcatctgttggctacttctgaagttccgtggccaccatagtcaaaagcaatagaagggaagggacacaaaggcaagggaaggcagggaaaggatgcagggaaaatcagagggaacacattttcatctgaatgtggcttaaagattcctctgtgtccctagtttgagactcattatggtggcactagcccagaatacatctctttttgtctgcaagtaaagtaacataaatgcaaagactgctgctaagaagagggcctttcttcagaaaaaagctgattaactccttaatgtcaagattttgtatattctactgttatcctccttctaggaaaaaagaagcactaaataaggtcaaatgatgtcacaaatgagtattcaaataaaaaacaaaaataacccaggactatgtctgattgtggaagaagcttttcttaagatgaagtaaaattaaaatttagaaactgttttcatttcatacaaactaaaaaaaaattctgaaattgaaatttttaaaatgagtttaaaagaagaagaaaatatttagaaacgcttttcaaaacagtactccaatatggcaccattacaaaagacaaaagatagtgtccaactgtggggatatgtgttaattgtatggttttccaaagatgtgggagaactgatatcaattacagtataattaccattacttccaacagagttaacatgtagttaccataaaataacatagaattaactggtgtcacattgcacaccagactaaataagatacaaattaagaattcccaaatgtaacgataatactcttctatctcttaaaaaatacaataaaaataaaacaacttttctctgataatgtcacagcatttgcaggaattagtataattattcaaagagggaaaaactaagatatataagttagaaatcatcatttttagttataaggtaaaaaactgcatagggatggagaagtatatattaacaaaaatgttaaatttaataaactaaaggtatagtaaataaaatgaaatttcctacacatttctttcaagtcctgaaaatcaggcagctatattttaaaaccaaattcaagaatgttcttagtttttactgatacctaatattttttactttatttatcaaacacgggacaagagcctgctttagtcgtactatagagagacacagaaatgagtcaggctcagttcaagacaggaatttaaacccaatttttagttctttgctatgtgaagcagtaagtcatgtctcaatataagtaatttccttatcaggaggtgagcttaagggacaaagaatgctacagttcaatttgaagaagcagaattccttgctggaatgtctcaagtcagcaacaataatacaggatgcctccacgtgctgcatatgagagaggggcacgtgtgggaacacgtacatgctcaccgcgcatctagatttaattagaagagaactgaaaatggcagagtgcaatgctgtgaagttgatgggaggacaaagggaaaggagctgtattttaaatacagctacagtgtatctgctatatccgtttcaaacatctgggcttccaattatttattgaactcatgtgtaagacttatttgggaatactgcaagcagttatagaacaggaacatgcaactactttgtaaaatacttgcaggactgaactcttgataaaatcttggacaatatgagtgaaaactgctctgacattatttgagtcaatgtgtgcaaaccgtgaagaggttagcatgctaagaataaattttgtacacagcctgctaattaatgtagcagataatattttattgggaacttatattttgcatatttttgaagatttagtttatttcctacatctgactttttttcattttttttcctttgtggtatccacaggcttacttgagattaaatgaggctagacacatttgtaaaaggctgcacaacttgtttgaagattacataagcatatgcatagatccacaaagctttcagggaaagtctgttccctatgtagtcaatattttccttttttctatgaatatggagcttgggaatagatgtattaattttgcacccagttccatgttttattccattgaattcgtgaagcttttgttaggctctaagggaaaccaaactggctaggagggatgacaacagaacaatgatgggtacattattattccatgttatttcctcttgttcccacatcactgttacattcctctgattattgcagtctcaaaaaatgtgctgatcactgtgtgtgttaggcaacactgcaagaccgagaagctaatatcccagatagagtacattatgcatctgatgtaaatgaggtatgtgctctccacatatcggccgtttgtcatcagagagccagcaaacagagcggatgggtgcgagtgcttttattcccttccactgtttccacaatggtgaaaataaataagtaaatagaataaaaatcacctgtccttcacaactgtccttaactggcacaaacttgaaatatttacaatgtaatgtatattttgggtagagctttgtgtttgttgtcattatattaggaaaaaacaaggctcgtcatcttcacattcagaaattagaaactgaaatgcagcacattgtaggtcataccagcaagggtagcgactgcaccaactttatttctcaaaaaataaaatgtaagatattttaaaatgtggactctgaattcctggtctaaaagcaagtgcttcaacataaacaatccttcccgctgaattagaaatgatgcttagatcacaggttaaaatctctaagtgaaataaaaacatctccaagggctctaggacatgggctcaataaacaagcacatgtttattcctacagcttgaataacagcacttctgcccagataaggagaaacttggaaaattagcctaagcaggatgtgagaccgagagacagttccttcagtcctaaagattgtctaatgagggccgggcgtggtggctcatgcctgtaattccagcactttgggaggccgaggcgggtgaatcacaaggtcaggagttcaagaccagcctggccaagatggtgaaaccccatctctactacaaatacaaaaattagccgggcgtggtagcgggctcctgtaatccgaggcactcgggaggctgaggcaggagaatcacctgaacctggaaggcggaggttgcaatgagcagagatcgaaccactgaactctagcctgggctacagagcaagactccgtctcaaaaaaaaaaacaaaaaaaaaaccgattgtctaacgagaattaactaaaatggatttgaacagtctcagggaaaaaggcagttgttcatagaacaaataacttcccaagtgaatgttataattagccgtttttaaatctctgtaaaatttttaatggcattttcagaccaattaatgacttaagagaagatcatgaatataataattatacaagctacaaaagtttttataatatacctcttatttaactctactgcatatatttgacacaaagaagtgtataacctaggaaaggagtaaatctgcttttcaccctgattaaataaaactcatatttgaatttgcgttatgatcaaaattttaattttgcataactgaggtgatgaccaaaggagtagaagaaaaattgcttctagagagccaaacttctcgactgcttcgggatctgaatattaaaatgtcacttatataaggcttcaggttgtacattgtgttctctaattggcaatgtgacatgaaggggtggattattagattgcttaaaccaaataaagtcttagtgtaaatatgatctatttagaaactcttaggtttgaataaatatgatctatttagaaatgcttaggtttgaaatattagtcttcccttgaagattaatatgtttgaagcactcacacttgtactttcaattattttaaaattcattgacaattatagtttctcaactaaaaataatacaaaattctaaaaattcattgtctattgttctaaacagttacatagtttgccttctgtgtaagctgatttgactgcaaactttacttctctttagtatggtttctacttgaaggtaaagcaatatttaatactgcctcaaatatcaactatagaaaatttctagctcattaaattaccttttaaaattatataaacttgaggaaatgattctggaaaaccagtttgtacaaaaccatatgaaattcactaactcatagtgttttgatctcattgtattatgctgatctgtaaatccatctacatttagctaatcctcagtcctcagctaattctttgagccagagatatttggtacaaccgacctgatttgcttgaaatagacttcacttcctttctacaccctctccttctcaccaccacccacaaagatgataaacaaaaagtgttttatttatggaaaaaaaagtgatgacatgctacttatttatgctatcagcctaaggcagctttgagtctacctcattccaatgaaacaggaggcaggaggcacacagcataaagcttcccttctgggcagaaatcagactcatttcccttcctcctcacacaataaatatggtaaatggtcagactttgtggccattagcatcttataaattgtaaagtcttttcccacatattatctaattcgtaaggcacaatcatcctaattttacagaacatactgagactcagtaagatttagagacttccccaagatgacacagatactcagatgtaggcctagaagacagatctccagctttaacatcaagactaaattccttctacgattcacatagcttcatttgtcaaactttactcagttttaggtacatgaaatcaggaagctcagcatccatgttcacttccaaagctttgcaagttggtatttattttataaatttaactttctgaagctattcaaatccagtacttcattgcacagccatttaaataaatgacatcagcatttgattctgaataaatgtgtactggttgtctctcagcccccctaggctgtgcaactgtttcatatatggttaattcttatgcggctttagaggacttatcattggagatgcacacccaagagctcctgttaactgtgctgctatcaaggacacaggagtagggtaggtaggtatgcaggtattacacactagagccctgccatagaagaatgcagaggcagcagctgcctcctgtaactataagaacttgcagaaaaatcatcaatgatcagagactgcaccctaactgcagtaggctgtaagattgcagtgagaagtgaaggaaggagagagggagggtggaaaaataagaggaacaaggggaacaggaaagggcaatgggggagcagaaatggaaagagagggtaggaaggaggttagggagggagaaaggaaaggagagaaatctattctcacacataccaggaggcagagacaaagaagtgtggaccgagggcgatgcatccacaacctccagaatagaagacagatgaggaagtggcagtgagacaagcaaattgagacagtgaaacagacttcagtattctagggccttgtaagaggcaaccctcctataatatgaatttactctatctgaggaatgccagacacattcaaaagggcagagagatgaaaataaattttcatctccgtaagagtaactacttcttccaaagtctgggctctagtcacaagcacacaatcaatgagcattttaggctcagtgttaggggaagagcaaagagtaagacatgggctcttccttcaagttaccaataatggtaacagtgtggtgcagtaaaaagtatagaatttatatagagcagagctggtatttgaacctagagttacctgcatgaattttcagggttttgttcgatttgttagtctataatgggggctaataaaagatatcaataatctttacctcacaggatttctgtgaacatcaaatgtgatttttgtattaaaaattcatcagtcacaaatgcctataaattatgttaattatttcaaattttcatgtagatttacaatcctatatcaccctgaggtttctcccagagagaagagtgggagcaacttattagttgcttctataattgtgtaacagattgactgtctccaagtttatctatgtggagaaatacactccatttacctcagccaccactaccatcattatcctttattctctctctctctctttctcacacatacacaatcatacatacaaccatacatacagcctctgggttaactttcttagccaggcattcaaggcttccatcatctgaatcctgcccctctctaactcagagtacacttctctcttgattgagctgtcctccagccattattccccatatgcagacacatgccccaaccatactcatgccaggaccctgcctagacactcctgcctacctactccagcctgcctgtccttcctttgagggcatttcaagtctctcctcttctacagaactttttttccaccaagggattgatcaggacggcctccttttatcttcattagcttaattagccttacgacacttttcattcactcatttggcacacagaccctctattgtctggttccttttcatggatctgtcttacctcccaaatcagactaccagactacactctcctgtaggtcagaaagagaccagtcaatatttacctgaatccctagcacctaacacctaacccatacatcaaatggtgagcacttcctacctaacgctctgtgacgtcatgtggttgcaaacaacaataagggaaccagaagaatatttatttgcatctaccttacttcacatatattatcttatttaatattttccacaaccttatacagtatgttcatcatttccacctcccaagtgagtaaacatagtctcagaaaagtaagtaacaggccccaggtggcatacctagtaatacacatgttgttgatcattaattaggctgagaagctgagatttggatttagacatgaccgatttcaaaggctcctgttctttatttcattcctgatgtttgcctagacctggagaaatcatttcatggcaatcaaattggtggtctggaataagaaaggctaaacttgctaccaacctcccttgaaggagtattattaagatcagagaactcggccaggcgcagtggctcacacctgtaatcccagcaatttaggaggctgaggcaggtgcatcacctgaggtcaggagttcgagatgagcctggccaacacggtgaaaccccatctctactaaagatacaaaaaattagccgggcatggtggcaggtgcttgtaattccagctactggggcggctgagacaggagaattgcttgaacctaggaggtggaggttgtggtgagccgagatcgtgccattgcactccagcctgggcaacaagaacgaaactctgtctccaaaacaaacaaacaaaaaataaataaatagaaagaaagaaaaagaaaagaaaggaaaagaaaagaaaaagaagcagagaactcatgttcttagaagaacagaaaggacttgagaaaccaatgtgattttgtaaatgtaagagctcactaaaatgtttctttgaactagagatgaggtttgtcttcttgcccccattttacagataagaaaatggatactaatttaattgttgatattttaatctcaacataggcaagagaaccccaaatatatggtttcttttcttaaaaaattatgttgactctcaatatgggaagataacaattcaaatgatctcctttgttgagaactacaggggactactgcaacctagaagatatgagaactaaggccattgcgcaatgcattttacaagacaccctttgtgttatttcagaaccaatgctgttgacattatttataaaaagatataaagggcaaatcagggttgcactaaaaataaaatcaagcatttccatccatagtgggaagacagcactttgggaaattctaatcttagttgcaaatgtcaaagattgcaaactggatcttagctaaaagtaaacttctgccagactgctctcaatggcacatttttgacaaccagatttaagacaatgctgagagggaatcagtgatgtaaagaatatataaagtacatccatgtgcaaagttttcacatatactctctattcacagccctaggccaaccagctgaaaatgaaaataatcaagtatagtaatacccaacaccacaaagggaagggagtagaacacatacacgaagacttatacagacaacacacatacactgtcatacagaccgtctcacatatacacccaggtcaactgacacagacagacatacagattcagagacagacatagacatggacccagacatacctacagacatacaaatgcagagaggtgcacactgagatagacacacagacacaaagagatactgacaaatacacagacacactacagatgcatagtcggatagacagacgcacagcaggagcaggtacccacttctatagatacaaacagacctatggaaaaacaggcaaaataaatgcacatacacacacaaggaacagactcacagagacagactcacatatagatttatacccacaatgagaaagacatgaacattcacaaagtttgctcacatgaacactcacagagttacacgcattgtgcagtcacatgcacacacaaactcatgtacagccatatataatgtgtgaccttcttttcaaggcgcatcaggacacatgggcagggataggtttgggggaagaaggtgaagtccgtctgttattgcagacagaatatgggattcaaaacaaaaaactttgaagtctctcaagttcaatattaactgtgtgaatgtaggaaaatgatttgagctctttgaacctcatactcatctgtagaagagaaataataaaaattccacttcttaggatgtttgctagaattaactttaattaataaatgtgtgaaatgctttgcaaacaatttaaaacactgacattttagtgattgttattattatgttcttaaaactgccacgagcaaagaaagcctcttaggaaaagaaaaagttaaagtattatccacctcacctattactaagaacacttaatgaaatctatttttaaaaattgatctttagggaactaaatatttatacaaaatgtagttacagaaaattgtgttactggcatcaacttaaatcaattaatattatatttagtgcctactatgtgccaggcatgtctaggaaatgtaatgttctatttaacctacactctgattagtgaagctatcagatacaatatattccatacttatctctattagcaaggatgatagtatagaacaacataagcagcactaagactgaatttagcactttgagaccatatgatgccttagggtcaccaccataagcatcttaggaccgtgaacattagagcagaatctggaaagcacacaggactgagtgccagagagacagaggactggtcccagtctcagtaacaccctgtggctggatttgggcaatcacttcacttctgtttcttcatctataaaatgagcggctgtactaaatgatctctaagggctcttttagctctgattcaactcttttttttttttttttttgagatggagtttcgctcttgttgcccaggctagagtgcaatggcatgacctctgctcaccgcaacctctgcctcctaggttcaagcaattttcctgcctcagcctcccgagtagctgggattacaggcatgcgccactaggcccagctcattttgtatttttagtagaggcagggtttctccatgttagtcaggctggtctcgaactcccgacctcaggtgatccacccgccttggcctccaaaagagctggaattacaggtgtgagccactgcacccggcctgattcaactcttcttatagtgtgatgaagaagtgctgactaatggtctttctgttgagagagtgttgaatatatgaatttttactatactactacaaaaacaaagaagttcatatttcatatctctaaagggaaaagatctatcatcatcactggactagagataatgtggacgagttatgattctgtaagaatagaaattggttaagagatttttagacagagcacacattagatcccgaattcccaagggcaaagatctctgaggaaaatcttcaggatataccaaagccaacatccatgaaatgggatgtcaaagtctgcagaaagttcagatagcttttaagcagagcaccctcctcttagctcagaaaaatccagatggacccagtttcctaaaggcaggcacacagtaaaacaacacagtgtgttttcaagtgatcgcgtatgcttctctgaggaatctaaaaataagaacttagacagattctttgttagacttaggaggcagcttgcattgtcttgagaagttttgtgaaaacttaggaaaacagtttagaatctactcagcctttctaaagttgcattttaaactgaacccaactttaaatgttcaagttttagcagacttttaaaaatataatttgtcacttaaatggtctcaattttgtatttaaaatttgtcctacaatcaaatgacttcaaacttaatatttgttttgatgataatcataactatatatattttctttaatgtgctcttttaaaaataactaaaaaattcctgacaacatgtgctttgatttctttctgcaactcagatatttaaaaaatgtttagtacaacaagtggattctaaaggccacctagatgggtctgatttaatttggaggttgggaattcttcagaaattaatttgtttatgtggggtgacatagcattaagtcacctgacactaaacttgtgatatgtccttcctctgcatactgtttgtctttccactggaaaagccctgtttctacaacaacagggcagcttctaagctaaggaagggcaggagtgcaaaagagcccaaggccaatttaaagaaatttcaaatggagttccacctacagaactggtcttgggaatgctgcaagagaagaaaatggattttaaatgcataatcctgagtacctggcttatagtttcatagctttttgatataacctgtaataacacagggaactaagtgttattaatcacagataaggacaccaaggctcaaggaagtcacagacctgtgagttgtggaagcagaatctgaagccccggtcactctgactccaaaacacatgctctcttcactcttgcacatctctctaaaggtctcgcccattctttatttaaactgccaccatcatattcttcttaaaatgtagtttagattaaatgtgccccatccacaaacacctacaatggctggcaattatctacaaggataaaacttaagctagccatgacaaccatctctttcagcctgctcttctaccaattatgtgtcaggttctgaatgaggccacttatgttgattatagcaggcctttcatatccatgagttccatatctgagaggtcaaccaattttggaaggaaaatattaaaattttttttaaattaaaaataacaatacaaataatagaaataaaaagaatgcaacaactattgacatagcatttatgttgtgttaggtattataagtaatctagagatgatttaaggaatatgggaggatgtgcctaggttatatgcaaatactatgccattttatataagagtcttgagcatccaggaattttgggatctgcagggtagggaggtggggtcctggaccaattctccaagagtattgacggatgattgtactttactgaatcatcataacaaacccttgtgcatagaaactatgcaaattaatagcatttctcagatggagatgttagggccatctaactccaaagcctttgctcttatcaacaaacttaattaaatggatggaaaagtaggaaggaaagaaaaaaagaagggaaggtggaaaggtgggagagagaggaaaagaagactgggaaagagggaggaagggagtaagaatttattaaatgcccaatttgtacagaagatattttattaggaggttgaatattaaatcatttaattctcaaatcctgatatttttatagattgggaaacttaagctctgagatattagcataacagtgataaagccagtattgagccctggttatctttccacttcacatgtctaatactatgctttgtatatagtaagtacttaatacaaatggaatgaaattgaaaaaaagtgtgtctgtggaataaagtgctgcaaacaagtattcaatgtcagtcacattacctaaactaaggcaaataactgtaggtaaaaatgcatctaaaagataaatgaaagatctgttaagaaatagccctgaaaaattactgagttctcaaactgaataggaatgttataggtacattcttaggtatgtctgaagcttttgtgagtgcccagagaagacctatgtctcttctgagaagctgttttgtttatgttgtagaaatactgtggctgttgtaacacatttcctttttgcctggttaccaggaagctcacaatcgagtctgtggccatcctttagcaattaggtaaatatgtatgacaagaatttttgtgcacttcacttatctcagctttaccctacttaccttattttcctatccttaatttttatttcccacaatctcctctctatttagtttttatgttgttttactgcacgtatcactgcaaaccacccaaaattctttttacatcaaggcaacgtataaacacaaatagtacaactgtactgttttgctccttaattcaaacagaacaaagccattggtcaattctaaacttttactgtgtttgatcagtgaaaactgttattaaggttaaggtgaatacaattaaaacacataatgcaggtgtatgtattacatgatctagaatagcatatattcaaagtatcaccttggtaatctcaaagacccttttagagggtccactagatcaaaactatttccataataactctaagacattgtttgacttattcattcttattctctcttgaatgtacgatggagatttccagaaactacatgacaatgatacaatttggatgcaaaagcagataccagaatcaagcagtattctaataaatcagacattaaagagattcatgaaaatgtaaagcaaaaacattcttctatttttttactttgaaaatatagttaatactaaaaaatggtatttatattactacctaattgatttgttattgttatcttaaatattttttgatgttttagttttaatatttaataagacaaatattggttgataagtcccacataaatcaaaactcttcagggtctttgataatttttaagagtgtaaaaggcccctgagaccaaaaaagttgagaacagctggtctggaaggattaagagattacatctagaagagattagatctagaaggattaaggattagaaactacctgccataatgggaggttaggtctataaaatcctcataattagtaagtttgctccatacataacaaaaccaacaactctttcacagaatgtatgcaacattattaactgaatatatcgaattttagccatttcattgagagatacattaactagatgtggccttttgactaaaacatgtataaataaaactcaaggctttatatttattcctacacctacacctatccctaggaaggatcttgaacttgtacacttatatataaattctcaccatttttttcctgtttaaagtacagagaagaaaagagccaaacaagtttgttgttgttttttatgagtttggccttttaagctagtagctaggcaaccaatcaagtagtcctgacaacagaaagaaaaagaacttaatgattacattcagccaggagcctacatacagaacttcacagttgcccaatgttattagttcaaatgtaaaatccaacattaataaaacttaccttgcttttctctaattttatagcacttttgatctgtgtatgttcttttaaaaaaacactatcgcaagtataaatatagctattcatttcaaagaaatatgtatgaagcacatatatctagatagacttctttagctcataattttagcattcacttcattaaattgatgtttgaaactcagatgtgtgtcttgttttagattttaagtaaaattgcgctatcaatctcacagagatgtagggaacaaatgagatgatggaaaggaaatgctggagtaaagtgatcccgagctggtcttagtttcttcatctgtgaaacaaggacagtaataccgacatccctgaatttggaaaggtttaagagcgaatatatatgtaataatatatttggagcatagaaagcagtataaaaatattcattgtcgtgacataaagaaagagtagtacacaaatgttttttaaacagtgactactgctctgctttgcaaatgagaattacaattagaatttcttcccttactgcaaaaatctctaatgtgccctgcattcttcatagtacaagttgttgtcttgagaataggttgacatagaaaagcaacacaaacatgttagtcaactgctcacaaaaatgacaatcctgattaattaggactatatatgcctttgaaaacaaccaaacctcactagtctgtgagctatagaaggagctcattcattcccaacacactttgctaaataattttctcacaagcccctttcacttactgctgtacagctatattgatcctctgtctaaatttatcctgtcatgcaataatgaatacctgaatcaattgtatgaataacaaggagctatggtaattgacaatgcgaagcagaagatgtccagtatgtttttcttttccaataaaagggggcagtattacatcagtgtaatactgatgtactattctgatatttttgaaacatatgggtgaaatgcaagaatctacactttcaaaaaatgaacaatggcttcttaaataaatgggaacaagtttacaatgtgccccaatgattagatattgttttcctatttaattcactgaaaaatatcatttgggtataagaaatgtaaatagctatcaagaatcaggtcaagcttttctaaaaaaattatagattaaaattctgcttttgtggaaacatattaaagaatatattaaataagtaggaacaaaagctccctagcacactaacataatcaaatttgagtattattatcaagttggctttagccagatcctagcaggtagctagtttatacaagttactccaaaaatgaaaaagaaatatgcatatcctgactttgtaagaagctgcctgttagaatctaactagcctttttttctcttttaagacattttggatccaaggaccaataggttgactcattcactagtggagagtatcaaagaaagaaaaatttaaaaactaaacaacagatttgacaagctgcctgccatctgaaagtgagaaagaatgtgatattaattgagcatcttctgagcaagctatatgctgtacatatgcttttcttcaaaacatcccttcaagaaaatggtaattatctccattttatagaaatgatcattgagactcagagaggttaaataatttacttaagtaacacagttagaaaatagcacagggagaactgagacccaggattaatcaactctaaaatccatgttctttgtaatctacatgtagtctgtctttctatgactgctgttggtctagccacctcttttgtttctttgtctataccagcaccattcaatcctctatttcctgactggtagctttccagcgccagcagcaacggacaccatggcaggaaagaataccctacccaggtagaaggtgacaagtatagagaaagcagggagctaaatgcttttctgcttcgctgtttttatttattacctgctttatttcatcaaagctttgagattgccaatgtaaaatgtaagatatcataggaaattaataaatgaatctggtattgttctataagtggaaatacaattaactaggaatcaggaaagctgagatttaatttctgtcctgctacaaatacactatgactgtgggtaagtccttttctctctctaggtttcagttttcccatatgcaaattgaagtgattgaacttgatcaaatgtaatgctccctccaattcttttactctacagttttaattctacccatatacttcagaggcaagtaaagtgtgataatagtgtccactgtagctcactttgacacctgatgaggtcaagtatttttctcaagtgattcccagataaggaagtgaatagcagctcaggacacatgtgtacagatgtgcaatctgacttttcatgtgcagttgtgatcagtaggtaatcagtctactggctcacataacacctacgcaggaaagcattccaaccaatgctttcactgagtcagcattcaaacatcaagaaggtcagagagttacagaacatactttaacatctaccccttcattaaaaaggcccaccctgccttgcatgtcttcttgccagatgcccttagcttagctctgaggagacttagaagcagcctaattaaaattctgttatgtattgtcatgactaaaatactctctatcttagagatgtcaaaacaacaaaatttggtaagcaattaggctatagtatgatctaattgcactggtacttagactggggtgaagatggctggtgttctttgtgtggaaagctacaacccagggcggtaacttagacatctgctggcaggacactgacaattcatgcacagaagctatgttgaaacgatggagcagaatagctcataaggtgccattacagtctattgtccctacaatgtatatatttaacagatcctaaataccccgtgacacatcgacacagtcgacaatgactccactggtgccgtgctggccaatcaagtcaataatgtttcattttaaagtgccaaaatagggatttacccaatacagtgagacccatcatgagtaaacgtgtaatcatatggacacatatatgattctataagtactgtaaagacataagcatccctatgcctgttagtaagtgttggcccacatttatgatatatacaaagactgtcttgtacacatctaatattactaaatgtaacaagctacagtggacactgatgtgcagcacagatccccccctgcttcaggactggaagatttattccctcagctgctggaaatgctgttggtagctagcccttggctgtcggccctcttcagcattgccttagctggagagagtcacctcactcaaggtcatgtcctcttcccatggcgtcacttatccaatgactggttgatgcaggggtacaaaagctcacactctcaccccaacttaggacaattctgaatggccatggcagcctggaagcttcctatgaggttgctagagaccctagttgagactgcaccagagtacaacctctccctctgcacagtcctgggtttttttaaaaaattaaaacttgtttattttttagagatggggtctcactatgctgtacaggcttttgtcttctcccttcccttagcaattctaaaagcactccctaataaacctgcatgctgatcttcatctcatgacctgtttcccaggaaacccaaatctgtgccacattcctctgcaaagagtgtccaaatgagggagagaagaggtatgcttaataaattataaggttttatgtcagcaacaccacaaaaaattacctacaactgtattatgagctacaaagaacaaattcataaatctaatggatagatcttatatttaaggaaacagattattccaacgtgaataactttgaagagagttaaactgaatttgtcataattcattttccagtttaattgcacattatacattaatatttaccctctttggctcagaagaaaatctgatgctcagaagaaaaagtagtgccccatggaaccccataaaattaagactgatattttgattataagaaagccaaagctaccatcacaggaatccattagtgctgtccttcatttattcttctgacttgaactaatctagcaagcaatcatagatactgattctagatactaaacaaagcctacaagaatcacaaaatatatgtgcaaaacagtaacattatgcaggagagagaccatgttaaggagagctcatgaacacaacatccctagtaatgaacttttcccatgccccaaattcaaccccagtaaggttgtctactgagaaaacagctcccttcaacttggaaaccagggttttctggttccattgaaacaattttgcagcttaccttctgggactcagttatattcagtgtgatatgttttaggtcaagttcaaatttatctatctatctatctgtctatctgtctatctatctatctatctatctatcatctatgtatctatcttaacctcatctctcatccctctcccgtgtgttccaaagcaaaataaagttttatccttttaaacttcagacttttccctcccaaatgaatttaaaaagtcaatgagaaatacttaaaattaatctgtagaatttgaagttaatagtgtctaagtttgaacttcaacagataatacaaattcaacaatatagggtactatggagataatttttgtgtcccctcagaatcccttatcttgaatccccaatctgcaatgtgatggtcactggaggtgggtctttgggaggtaattaggtttagatgaggttatgagggtagagcccccatgatcagattagtacccttctatcagataatcagaatttttcacagtctactaatagcctctcaaccagtctccctgtttccattcttaacctccaatatagtccaatcttccacagtaggcagaatgatccttttatatgtaaatcagatcatgtcaatgtcctggacaaaatcagtctagggattcccatcacactcagaataaaatgaaaagcctttccagggtgtaccaggtaataataagctctgcccagcctatcacttttactttatgatccccggctgtgtcgtctcttgtgccattcctgccacactggcctccttggtgctggtctaatcctccaagggcctgcatgttcatcattcctagtgcctagaatgcccctgctcctgcctttcatatggcctggactgttgcttcattcagatgtcaatgtcacttcctcagagagtccttaccacttcatctaacatgccagccctataacaccctattcctttaacttgcttctattttttctcacggcatttattgacttcctgccattacattttctatttaattgtttatttcttcattgtctgtgttctcctattagaatataagctctaggaaagcaggtgtctttgtcagatttgctcactgctgtatctccagcgcctagaacagagtccatcatagaataaacaataaataatttgctggatcaaaaaccaaatgaatgcaatttgcaaattgctttgttttgcttcatttttttgtcctggttgacaggaagtttagtattacatttaatggtgagtcatggtaacatattagtcttcattgtaaacacatatgtgtcttccttttttaatattctggtactctacttttattctaataacatcatacatctcctttattttaagatacatctatttcagaatgtgacagaaaaacaccaataggcaggtaggttgggaggcaacttacactgggtgggaaagggcgtatttgttaatcaacaataatgcttacagatgctacatgacagatttcagtaaagtacaagacagccctcaagctggaagcccaaatctatggctgcaggttgatacctgggagcctggaaagaaccagatgagagtgagccaataagtctagcagatccagtgacacaaggaagcagttttaccttttcattcctgcagctgttcagccccatattatttatggaggacagtttcccgtcaacaccatgtggctgttgctgctgttgctcccgctggatctgctctcgcatcttccgcgcctcctgaatggctttcatcactgtatcctgatccccaaaaagggcaggggagttgagactagataggatatctgcatacacaggatgcattattagatgcttgtgaggtcagactcctaaaaagtactactactatcccctcccctgtagaaagctgcattctctgaacaaggaaggggtgcacatttgctattttttaaactatacgctaatatacatagaacacagagccagggcaaccaagctgtgctgggttcttttagcccttggagaaaaccccagcactccagcctacctggattctgtctactcacctcctcacagactacagttcctagactccaattgtatacatattgggggaaggtatttgctctgcctgtatgtacaactggtgcacaatgttgcctcttctgtggggaaattatggggaggaaggggttgaggagtgggcaggaggcagagatgtttgtccaggctacccattatagttgctgtgataatacaacacagtcatttctggcccgcagaaaaaataaaaaaatctgtgaggccacatgtgtactttagtgatatctgtatctgtgtgttcatatgtccactgcaggaaagagggggcggaaggaattcaccgtactctccagtaccccagttgctggctggttaatgaagcattcttctcatcaagctgcctcagttatttaccaagagaatgacaacccattccccacccccagctcgaacacccactgtgatcagctccctcacttcatgacaatgaggcgatatgtgtgggactggttttcgcataactacaaagcttcaaaaaaaaagtgagaataaatatttacttccagtgtatttcaagcaacacagaaggaaaatcttcaatattaaactgacttatttccaacgatatcttgcattttactgtgggtaaaatgaatactttgaataagattttccaattttagacaaaaagagggcaattttttgatgataggtttcatctgctgtgacaaatgttagtgtgatccacttgcttgagggctcgtataatcatttcatagcgtgtgtgtgtgtgtgtgtgtgtgtgtgtgtgtgtatgtgtgtgtatacacctcacataggcaggacagaagaaatgagtgtagaatcaagctcatactggatgtctgatgtgtacaatgcatgtgcatatgcatttgagtttggaaaaaattcccaagctatacatggaattttttttttaagttagtcactttttggtcccacagcttttattttggagcttttctggtaaaaaggacatctctatccaatatcacctggacgagagtgctgttcaaacacaggtgctattacttcagcccatttctagctcatgatctaagaaatatgctctgctgagtagagttccataaaagcagggcctgtgactcagtcatctctgtccctcatgatactcaggacagcaaacaaatgctttccaaacaatttcagagtgaattctaggagggctatttcaaggtcaactctataatttatctccttgttggctttcttccctcatctcacaacttccaaaaatccggccaaggggcattcatattcacatgctggaaatgatttaattctatcttctatatggatatcactaacttggcatgaaaactttcaggtcccaaaaagacatccttactcaaaatgagaatatgctcctgtagagatccaatattccaaaattcattgaggaagattaacatctcactatcagaagattcacttagactcagcacaatttagcaaatattctaactgtgagtttacaaaaagaacacttgagtaacatgtgagaggacctagattctagtcctgtttctgctaattaacagctgcaggagtgtgggcaactcattctacctgtaaaaaccacaatgtatgtatttgtacaataagcataataatatactatctaactcataagattattgtgaaacatcaaatcagataaagtaggcaagaatgttttttaagctgttaatggctattcttatacattattttatctattgaaataagcattttagacttcaggactcaataatacaaggaaggtaatctgaagaaatgctaggtcttgtccctttaatctttaaatctgtgtctgtttggaaattaagtctcttaatttccaaagagtataacaaattaagagacttaatttccaaacaaagagtatagtaacaataatgttaatgcttattcggcactgtcttactgacaactgctttcacatttattgtttcatcccacttatatatgtacatgtattgataatcattcattctagtcattttaaattgaatgccttctaggttctaaactgcactaggcatttaatatgcatttttctgttttaatcctcataataacctatgagctagtaatactaggaaactgaacttgaaaatattaaataactttcttggggtcacatagctagaaaatgaaggctctctgtccaagcctgcctcattccaaaacccatgttttttcctccatacttttcacatagggctatgaatattcctagagatacttggccatatatgggggagtataaggagccagacattatgacatcttttcctacatatcaatagtatttcatatatgttcttgaagtgtgtcattcacatttgttttaatgcaaaagtcatatgggataagatgtaaaattcacatacactttgatagaagataaaaatttcaaataaattttggtcttttgaaaggttgctttgaagccaggtcctatgtccctgaaaaattatctcagtgtcaaagcactgaccatatatagaagttcctaagtctatgatttgctggatcgaactcattatcatctaaagaatccatcccagcaggatttatattatgaccttttccaaaagttctaataaaagaagatactaaattgggttatgtttcagtagaaaagataagagtattatcttttactaaggagcactttggaaacaagtatcagtcgtaactaaacaggtttgctttcttttacctaattcgtaagtctcttcctggtgttgacttttccatttacctaaagaggatcctcttcccaggcttcctccaatggggctagggatgctgcttttgtttggcagattgacagggctggttttgctggctgggaagaggttctgggtgggagacgttggggactttacaggctctgctgtcttgggtcgggatgagagattcagaggctgtgctgctgcttcatcctacaagagtttaacgtaaataattatttttacaaaagacaaatgaagcacattatcacttagtaagccacagttattttacacctcagagacaatgccacattctcctacaataataacaaaagaagctaattatctacctccttgaagattcatcggaaggaaacctcattaatatccctgtgttatgcttctatttacattaactgtgtagttggatcattctttttgccaaattaaaatctgaattagctcacattacagcttaatttcctaatgtgttttcagggatctaaattaacctagggcatttacaaagaattatttaaaatttcagcagctctgtagtgcttttgtgttactctctctgaaaagttcttgtagctataaatagtctctgcagctaatttcttaatatatattttaaatcaaacaattgcaagcactttaaaaatggaaacatggaaagcctttttctgatgtactaggcccctgcccagggagccacatgccacagcatggcttctatgtggctttctgggtgtgggcactcttcatggtctatattctggtctctattcatgtttaaaattaatttttgcaaagaccaaggatagattataattatgttacacatactatgctatatgcaatttatttttcatgtttaaagtgatgtttctttatatgcttttctacatatatttacagaatgtctattttaagatacatgtccttcttcactgagacagtattcaaatatctggcttgtaactgtagttcatccaggatcttgaaagctaagctccttcctttattttgtctcatttatcctgccataaaatacttgaaataacactttcatcatcctagaaatttagttataatatgaccatatttatttaaatgttcagttttaagatctgcattattgtgttctaaaataaaattgtcggcaaatgttaactcccactttgcttttaagaaggcaaagagaactagcttttaatgccgttgtttaaaagacccaatagagtttggtaacagaacattttcccccttagtaaccatgtgaccttgctggggctcaatttcttcatctgtgaaaagagggtctgatactagatgatctctaaggtctcttccagtactaatatcattgattaagggggaacagaaagagaggccagaaaatactacttgagaaggaggattagaaagagaaaataaaaacagcatgcgcaaagaagcaattatataccaagcacatactaagcattttcatatactagttcatttaaccgtcaatgactatgagcctggccagtattattctaaatttacaaataggaaaatggaggtcagaatgacaaaatcgcttgtctaaggccatataacgggggaaagaatttaaattctaatttattggactccaaatttcaggccccttttctactgaactaccagagaaaataagtctattgtttgataatatagtgatgccacagatttttttgtgtgtgttcatagggaaaaggcaatttgtcacatacgttgcaatgtacgtttatgtatatttatacataggacaggttctcaagcaacatggttacatccattatgaatgtcaaaattatcttatgtagttaatttcaatttacttccctttgctctttattcaaaggatgtttgaactagtttgttcctttactcacatctaaataatagggatttatatgctaggtgtttacttaattttctccatgtttcttttatttggggctcactgagcttctaaaaaatctaaatttaaagttttgatcaaatttggaacattttcagtaattacttcttcaaatacaattttctctttcttccttttctttctgggcctctaattgcatacattagtctattcgatgttgccccacagtactgaccagtcttttttctatgcctttcattttggatagttttattgttatgtcttcaagttcactaatcttttcttctgaaatgtctaagctgttgctaaacccatctagtatatatatatttttaatctcaaacactgtattgttcatctgtagacatttgatttaggtttttcatgtcttgctttatcatgctcacgttttcctctatcttcttgaacatatggagtttattacatcttttttaactttgaaatactctaattttttacttagttttataattcagtaattgccactttaaccaataataccactgggcatggctatcacctaccaactcccaattaagtgaatccctttccaccatggcagaactcttggtcctcacagcctgccctggcctgacaactttgtgctaaccaaacctggtagaaggggaaataacaatagccctaggccagaatgtcacagacccccactattcttacatataagaggcataaatattttctcagattgtatataactttggtcatttttaagaatgccaaaatgactgtttttgtcagttttgtccagctttataggtgattttttaggaaggcagatgcttatctcatttggctctagttgcaagtctcttataatagttgtttttactttcttatctactaattctatcatctgtgtcattttggggtctatttctattgattgatttttctcattattcatatattttgctgctttgcaagcctgatatttattgaatggatgctacacattgtaaattttaccttctggagtgacgaagtttctgtatttctttaaatatttgaaaactttattctgagacacagaacaatttgatccttttctagacttacttctaagcatttttaggcaaggtcagaacagccactaagtaggggtaatttttccccagtactgaggttatacccttctggggaatctacttgatgcccatgtgtcaggaggtctttccactctggctatttctggtcctttgtgaatcttgcagctgttttgtttgctacattctggtgtttccccttacctcaggttgtttctcacatgcatgtgctgatcagtactcagctaaatgctcaggggcagccttttgcagatcttcagcattcgttctccatgcagcttgctcctctctggtaccctgtctcacaaattccatctgcattagcatccctaaactctgaactctgtctctctactcagggagcctatgaagcttcctgcatagttgcctggaaacttccttccaatagtgagctgcaaaaattgtagtgcctgcctcacttgtttctcttctcataggaatcactgtcctgtactactattgtaaatgtctgaaaaccattgttttatacaattttgtcctgagttttagttgtttaagctggaagagtaaatctgtttttgttccttcatcatagttgacaatggaaatcctctaggtgtttatttaggatctctccctgtgtacaactagatatttcaatcacaaccactaaaaccaccacaccatcttctttattatcataatgaccagcagcagcatcactaccatcactaacatttatagaatactcactataatactagagggtgtatttaagacctataataatattaactccagtttttttcagaggagaaaactaaagtagaaagacactaagtggcttggccaaggtgatatagctagtaaaagtggtagaaccagtattttaacagaaacattctgacttctgatgttgacagttatagtagacaaaagttttagggggaaaaggtacatcagatcatctatatttatttttgatactttcagcaaatgttgcctatattctgtctgaatttaatataagtagtcatgttatatacagagaaaaagcaatgactataaagagaaacgtgagagattttggtaaccacagttctttaaattagcaaactttaagattattttcagaacatcttcagtaatatgaattatattttaaatttaaaatgtttgctttatgttttggtctatatatttttacccatatatacaataaaaaatctaataagtaaaagaaatatttcctttgttattaacatagaatatggtcaagtcaaattacccagagagatctctaagaatttgcatgtggtcaagtgagtaataaaattcagctggctcacaaagatggaatagtaaaagcagatataaacttgaatttaaccaaggaacattttactcatccagtaaagacttggtttggtgcagttccagttggtcaacttacttataaaatgacttatttatgttaaaatatttaatactcaatagctcaagtcactgatgtttgatatactcatactttaacaactacgagtaagcaaagtgtctttgagttggagtgttctcttattcataaacacaaactctgggaacataaaatagtctgtttccataagtgattctgtcttattaaatgtaaacttcctattgtcatatctcaatatttctaacagcagaacataaatgttctcctatttctttggagaatctaaaagaataggtggcattaaattaattcctttggctggaacatagactacttctcttagtgattttcacttttttagatctttggtatttgggatgcacttttttaaaagacttcctggaatctcaaaattcccatatgcaaattttagaaaacaaaacaatttcagtgattatatagcatccaatgattaatttggttggtctcagctgtttcccttgtgaagatttaataattgcaaaatttctccaaatgcagtactttaatcacattacaataaagcatttgtacttagcatactcctccaagtagataagtcaattatacaaaacaattgttcctctgtttgaatttgataattcaatatagaaagcaactgcaatcataaaaccaacaagtaccacctataggtaccagctgcagcacaaaattgcagtggctcatcaatttccctctcaccaagtacctcctggctgcccagtttcaagacgctgaaaattagtgagagaagacatctattaatgtcccagacataacttgggaaagcctgtttatcctatcacaactatatggcatcaaaagcgttattaggcaatgacaactcattccttaaagcccacatttttttttcatgaatcaaagagcatttattaaggatacagtatggatcaggtatcatgttaagacttttcatatttatgattttatttatttgtcccattgccctcattgtaaggacagtcctctttattttattttatttatttatttttttaagtatactttaagtccacatttataactagttttgaatgagagatcttcatcaacgaaccatacagagtccgacatcaaattctattttgcacttctttttaaatctaatgtttcaatatcccaattctctggtcctataagttaactccctgcctgtttaagacacatgaagagaaatgccacaagtccatgacaaagactggcaataaagtcatggcaattcatgccaatgatcattaaaaaataaaagccagaatccaaagggggaaaactctcgagaagtgagtttgcagattgaggtaaagatctcacaatacggcactattgttatcaaaacacctgtttctcaatgctcaattatgaaatttaccataaagagggacattttggggttgctttatgttgctatgtttcctgctgtttatgcccaacatagcctgcttcactatctttcttgtgaaacttttttctaaactgtttccacaatgctgcaaggcgagtgtaccttaacttgagttacagggctggtccctctcttttcattttttatcccagtaggtgagaccgtccctgctgtgtttggtggctgtggagttgatggcatctttgctccaggtgacacctgcatgctggccagctgagcggcatagagctgctgcaaaacagggaagacaaacattgatctctttaaatgcagctgaaattgagtttcaaaagaaaaaacttaccatattgttagatttctcagacagccttgtaatttctttttcactatttttaaaaaaggaagctaagagaaggcaaataataaaacagaaagaaaaaggacaggtatgggagccatagttctgtttctggtccttctagcaacaactttatgatcctggacaaaggatttgatctctttagaattcaggtttttttttttaattgtacaaaaaggaattcaactaagtagcctctaagatgctttttaatgcctaaaatctttattaaaagttatttaaatgtctgggatgtccacttgtttaatattaatattcatgaattaagaaactaacctgaacatttctaaggattcttggaagaactgtatcattcttatttagctctgactctgcatctctgggtattctgatccttctgaataatgagtgctgttcccaaggccactaaggcctagtggcagtcattgtttacccagggtcttatttctaggcagcgtataacataatcctcaagagaatatggccagattggtagcagttttgttgttttttaagtcaagcttctctgaacccaaaccaggtaacaaagtgcttccttcatgcttccaaacagatcaccacacttctctcttcaggtcctgcctttgcctgggattccacatttatcttcgtcatattctcattgctgtttcaaggccttttctgaagtattttctatagttctctttggcaaaccaatgatcttattactcattctatttactcagcttaaaatggttcctcttctctgagacatgataagcagacaatctgacattacaaatctttaaattatcaacctcaaaatatgttgatttcactaaattaaagccaaagattgaaagacaggtgggctaacctcttttcatataattttcatttttatcaaagtcattcttgtatacagctttacaagataaatagtacttgaaggttttaaaaaacaaaaaaccaaaacaacaacaacaaaaagagcatgaccaaaatgtacagtgcacagtctccacagcttgcaggatgaccttcattttcctaccctggtcctccttatctcaccccctgttctgtggagaccattcccttcaattcatttaatggtttaacttgtatttatatccttatttgtaaatcattctaaatgttatatcattatctacagtataaaggaaaatgaaagtttcactttcctacattgaaccccacatgtgctcccatgcttctctctccaatctcttaatgttaatgtcacaaattttaaaattagtgtttactgttttatattattttatgaagataatagctatgtagtaaactatacttaattttatttctcaactttttattttgttagatttaagatttgcctcatattttgttttcataatttttatgtaactatcactaattctcaaactctgcatgaaatcagtaaaactctacccaacgtaattgaatatatcaggtaatctctgaatcctggtttctcccttggagacatcctttctggaattctcaatcttcttgctccaaatctgaactaatttattcctcaggcctacctactgcagatctatggcacttgtaattccttttgcctctcttgtactggtgtccttgtttcccgagtatcatgttttcttcccttttagttaactgtctcattttggtacaagagcttcctgagaaaggtgaatgtgagattaattatttaggaactaatattcttctcacttagttgtagtttgactggtatagaattctaagttgaaaataattctgcctcagaattccaaagatattgatatgttgccttcctattcttgttattaaggaagcctgacactattttgcttcctgatacatacattcctttgtatgtaatctatttccttctctaaaagcatcaggatcttccctttccactgaatgttctgaaatttcactattatgtccttctgttgacttttacattcattgttcagtcttttcgatccaaactcatgtctttgtattctaggaaacttttttgatgtttttcattgataattttctctcctctgtattcatatttgataaatattagatttccttattaaccctctatttttcttattttttctttttatttgctaatctttgacattttgttatactctatgacagagtttttgcaacttcatcttccaaaacttctctgaatgttttaaagtttctaccattatatttttaaagatactcttattctctgattgcttctttttatagcatcctgttctctattctgtttgacaatattaattatagatttgggtttgtttttaatgttttctgttctctgcattgttaccactcttttcttccaaggtctttgaactctttcatattaggggcttttctaaagtgtctggtattcattggctgtttgttcatatataacagcaacgttctaaaaagctgactggaaggtctaagtatggggtagacttattgatttatgggcttcagcataaggtaatgatgcagaaagtctgctttttcattgggaaatcacaaatatcaatatctacaggtcatttatcttagactagaccattttcttggagagatgtcttcaaattcttgccttgatttgtgtatagacttgtatgccatcattacatgagccaagcaagagaaggcaggagaagaatctcatagtctggtctatcctgcagatttcctgattttcaccatggcacatcactcattctcagctatgcctggtgtcccaagacataaacctctcaagttctacttttcaagagaataaatctccagtgacttctgtgaggttatgtgctcatggggctggaagggaggaggcagggatggtagttaccaggttgcatgacattagggagggatcatcttatgtctattttcaaccagtcatcctgtctacagttccaccttttacaactgttcctttaatgatacatgatgccttcaattcctaagcattttagaggttcagctcccaactgggcttgattctttttggctttacactcctaaagcttaggtatcagctttctcttttttactaagacagttataactcatctatccacttctcatattccaaattttttgtcttctctttccatttctacttgaaggtttacacctataatccttaaccatcaatttactaggatttgggtaaaactggcaataaatgaaaatgttaatctgctgtggttaaccagaagtcagatactccaatcttaacactgtttaatgcttgaaaacttcattcaaatattttcttttcttcttataatcaaagttaagccactaccttgatggtcacatttctatcataataaatagaaagcttcctagatcatcaaccacggagaaaatagctcaaactttgccatatgagtaggggagaaaaaacaggtggtttgaatgtaatttccagcatttctatcattcagatggacaaataaaaaaaattacagtaatcaaaaacagacctttcagcacatgtaattaaatgaaagcttaataaagaataatttgcaagagccagatgtgcttatgtcatgattgttgctttctttggaacaatttttctaatataacaagcctctaaagaaattaaagtttcataattctgtatgtaatgactcagtggcaagaaaaattcacaagcagagtcagtcacaagcagagtcagtgctttgctagcacttaggcaaaatgaggggggcatctttttggtttctcttttactctgttgtatcatcttcctttgaaattcagccagatgtcttcaaaatggggacaggtcaagcttctgaaaatgtctgcttggattaaggcagtgaaaaaaagttctatactgaatggagtcaagatggttacgagatgaaacatgttgactatatagtcctgtagctggtatcataaccaatatatcctactatgagtattaaagagtcaggaaatcttagagatgctaacagtccttggttatcatttatgctttttacctcaatcattaaaaagatcaaataaatgtcaattttactcaatcttgagtcctttgggaaacttgaactagtgaaaaatgcagaaaaacatatttttggaaatacatctatttttttttaaaaaagttgactatgaatccttcaaattgagtgaataatacaattacttttcaggaaaagagtagtgttaattgcttcttttaaagctctgataatcatttattttacagccctttgaagtgggttgtacctaaggaaggcaagaccacataaactctgagattccatagagctggttcttgtgagttgtgattactgatacattagagaaaggaagaggtacagccacattccataatccttttcaaagctgagtaaactggacagtaggatatcaggtaagatttagtagaatgggccttgaaatagaaatcagaaaattgagtccagtgaaaagatagaaggtattcacaaaaattaaaatatccatattctgtctaacaaaacatatgattttagtataaatatcattctattcagattgaagattttaagtttgtcttggataatatgaatgtcattaaatgaataggtataagcttacaaaataatttcgcagctcaccctctaaactaacatcagttgaatttgttccatgtgtaagactctgtgttaggagctgaggagaattcaaagcacatagctctaaaggagatataaaatataaatccttaacacttgatctgcacttttcttgtggtgtttatcagtattttaaacttcatgtgtaattatgcacatgtatcttatcttgcttgatacactgtaagctcactgaagatatgatctaattatttttgaatgcttagcaccaataatggtgccttgcaaataacagatacccaatcaatagtttctgatttaacatactatacaaaatcattgcatattaggaaggaaagacagcatctataaatgaggcaacacaagtggtacatcattatatttattatatatgtgacaaacaattttatgatattaaggttaaaaaataaaaggcaaaaaaatttagtcaagtttaatcacactgtttcacaggaaattattcttttgaagtagtttgctaaaattttgactagacagctgctcagtaactgttagcttcactgaacagtagtagcatttctagacacctaaaaaaatctagctgaaaaccaaagaaagaaggcaatcccagttacaatagctacaaaaaaaaaaaaacaggaatatatttaaacaaagaggtgaaaaatctgtacaaggaaaactatagaacactgatgaaaaaaattgtagatgacataaacaaatggaaaaacatccaatggtcatggattagaagaaccggtattgttaaaatgaccatactgcccccaaagaatttagagattcaattcaatctctataaaaataccaatgtcatttttaatcaaattagaaaaaacaatcctaaaattcatatgcaaccaaaaaagagccccaagagtcaaggcaatcctaagcaaaaagaacaaagctggaggcatcatattacctgacttcaaattacactacaaacctatagtaatcaaaacagtatggtacttgtgtaaaaatagacacgtagatcaatggaacagaatagagaactcagaaataaagccacatacctagagccagctgatctttgacaaaattgataagaacatgtattggcaaaaggacattcttttcaataaatggtgctgggaaaattggattgcatatgcaggagaatgagactgaatgcctatctctccccatatacaaaaatcaactcaagatggattaaagacataaatgtaagactgaaactattaaaataccagaagaagacttaagaaaactcttctgggcattggtttaggcaaagaattcataactaaaacctcaaacacaaaagaaacaaaaacaaaaatagacaaatgagactacgttaaactaaaaagcttctgcacagcaaaataatcaatcaacagaatgaacagacaatctgcagaaggggagaatacttttgcaaatggccttaaaattttctaatacaaattatactgtttgagccataactaatgagtagtaacattttttcttctcagtctagttattaacacagatagtctagttaataacagtgtagttattaacagtctagttaataacaaaaaaaaactatttattctaaccaaatagctttagttagaaaatttctttgcagactaatggtttaggaacagaaaaggttaaattctgattaactattacataagggtctacaaaaatgtcattccacatataattctcagatcatagttcacagtcataatgattataataatgaatattcatttctaaacatagttgaggtttaaaaatcaacaatatagtaaagcttatgacaggcttagccaaagtcccataaacatttaaacttaggtgaagactgtttcagcctaaatatagaatgtttttcctgtttcaattttgaaaaattcacactgattgtttgggatattgaattgtttctttatccaagatatataaaagaccagcagtgtatatgtgtaaaaataagcctagctaaatattttttcaaaattataaaattacttattttataaaagcactttaagaaatgattttactttatggcttaaaatgttccacctttaatactggcagctttaataaagtagctagcattaaaatcttggtaagctcaacaatgagatatttgacacatagaactgaaaggacattatcaaatcatttaggttagtctgacttccttattctgccaacgagctaagatctagcaagtagcttgcccaagatcatataattagtattgaagttagaagaagaactctctagctatcacttcaacattaccagaatatctatcacttaaaagtagaaatggatataaaattagacaagttttgcacctttcaagcacatatccagcatcgataaatttgaccaatctcttaaataaattgaattaagaaagtcctgtgaagatctcaccaatccacaaataaatacttctaacagtatttgcactgctttgtgtgctgtggctagctttaaagataaatctgtcttccatttggatgttagtgacactttaataaccaagcctgtttagatttaacccaaagcagtaggtcctaccaatcagactcagcctcatggtgaaacccttcagtgccttccagtacacataatggtctatagcaggacctaagaaatgtattgtgtcagtaattgatgttataccatgactgtatttgaaaagagaagcatgctttgtccaaatatagccaaactgatgtcaaattataatgggtggtgtcacgatgtaactatatttaccataattttatatatatatatatatatatatatatatatatatatatatatatatatatatatatacctgctttctatgatacaatcatttaggatctctaatggagtgtgccaaacagaaaaagtacaaggccttttctcattataaacatatgattttcatgtagcaacataaccagtcatctagttttccaataatcaccccaattcattaatgcattaattcaacaaatatacattgagaactaaactcagtgaggcactgggctggatattttacatttattatttcatttaatcttcacaattattatataagatagaaattattatccattttagtcaatcttacttttaagcctgtattctttctgcttttaaaattaaattattttaaataagctacacagtgaaccacaatgaaaccaatttcttgttcctagtcatcagaaaaggatcactgtccaaggagaagaaagattatgatgtgactgctattctgagctctcaaacagaaaattgtattttcaaatgtcttacagttactctctaaaatggcatttcacaatcttcaaatggacaagaaagaggtaacagcaccaccagtcaccttgaaggaataagtgtcacaatcagatctagaaaatgtccttctccaaatcttcaagccatggtagaaaacccctaaaaaattaaccccacattaatagactgataagataaaaagaagaactatgcaaagtataagtagacagagcttgataaaatgggaattgaggggggctttaaattgggaccagtatgctccagtatacaaaaactaacagtaaaaaagaaggcacaaccttacacaccaaattcttttaggaatagattcttctgtgctctgtcatttcaatttattaatttattaagtagcctaccagaatccaccccggaaagaaagaaataaaaatcatctctcagaatacttccatactcattctacaaggccagtactactttgataccaaaaccagacaaagccatacatatatatatatatatgaagccatatatatatatgaagccatatatatatatgaagccatattacctctgatgaatattgatgcaaaaatcctcaacaaaatactagtaaaccaagtctgacaatacattaaaaaatatcattcatcatgaccaagtgggatttatccctgggatgcaaggatggcgcaacatatacaaatcaatcaatgtgatacatcatatcaacagaatgaagaacaaaaatcatatgatcatttcaactgatgctgaaaaagcattgataaaattcaacatcccttcctgatttaaaaaccctaaaaaaactggggatagaaggaatatgcctcaatataataaaagccgtatatgacagacacacagcaaataccatactcaatggagaaaaacagaaagcctttcctctaagatctggaacatgacaaagatgtccactttcaacactgttattcaacatattactggaagtcctagctagagcaatcagacaagagaaaaaaacaaagggtatccaaattgaaaaggatgaagtcaaattatccttgtttacagatgatatgatcttatatttggaaaaacctgaagactccacaaaaaccctattagaactgataaatacgttcagcaaagttgcaggatataaaatcaacatgtaaaaatcaatagcatttctatattctaacagtgaacaatctgaaaaagaaattaaaaagtaatgccacttacaatagtcacaaataaaattaaatgcctaaaaattaactaaaaaagtaaaagatctctcttaggaaaactataaaatactgatgaaagaaagtgaagaggaaatcaaaaaatggaaagatattttgtgttcatgaattggaagaatcaatattgttaaaatgtccatgctacccaaaacaatctagaaattccatgcaatccacatcaaaataccaatgacattcttcacagaaatagaaaaaaaatcctaaaacttatagtaaccaaaacagcatagtactggcataaaaacaggcacataggccaatggaacagaatagagaacccagaaacaaatccacacacctacagtgaactcatttttaacaaagctgccaagaatacatgctggggaaaagacaatctcttcaataaatggggctagaaagacaggatattcatatgcagaagaatgaaactagaccccatcactagccttatacaaaaatcaaatccaaatgaattaaaaacttaattcttagacaagacctcaatgtatgaaactactgcaagcaaacattgaggaaactctccaggatatgggtctgggcaaagatttcttgagtaatatcccacaagaacaggcaaccaaagcaaaaatggacaaatagaatcaaaccaagttaaaaatcttctgcacagcaaaggaaacaatcaacaaagtgaagagacaatcccaataatgggagaaaatatttgcaaactactcatctgacaggggatttataactagaatatataaggagctcaaacaactctttggaaaaaatatattaatccaattaaaacatgggtaaaatatttgaataggtgtttctcaaaagaagacatacaaatggcaaacaggcatatgaaaagttgctcaacatcactagtcagagaaatgtaaatcaaaactacaatgacattatcatctcaccccagttaaatgacttatatccaaaagacggtcaataacaaacgctggcaaaaacatgggaatccctgtacactgttggtgagaatgtaaattagtacaaccactatggagcacaatttggaggttcctcaaaaagctaataatagagttaccatatgatctagcagtcccacagctggtatatgcctaaaagaaaggaaatcagtatatcaaagagatatccgcatccccatgtttattgcagcactgtttgcaataccaaagtttgcaagcaatctaagtgtccatcaacagatgaatgagtaaagaaaatgtggtacttatacacagtggagtactattcagtcatataaaaatgagattgtcatttgcaacaacatgatggaactggaggtcattatgccaagggaagtaagccaggcacagaaagacaaacatcatgtgttctcacttatttatggatctaaaaatcaaaacaattgagctcatggagatagagagtagaaagatggttatcagaggctaggaaggataatgggagggtttggggcaggtaaggatggttcataggtacagataaatagaaagaatggataagacctaagttgatatctcaacagggtgactatagtcatgcccaaggccataggagcccaccttttgcatcagtttgacctagatgtgggacatggagtcaaagaagatcattttgaagctttaagatttgactgccctgctggatttcagacttgcatagggcctgtagcccctttgttttggccaatttctcccatttggaatgggtgaagttacccaatgcctgttactcccattgtatctaggaattaactaacttgcttctgattttacaggctcataggaagaagaaacttgccttgtttcaggtgagactttagacttggacttttgggctaatactggaatgagttaagactttgggagactgctggaaaggcatgattgtgttttgaaatgtgaagacatgagatttgggaggagactggggcaaaataatatggttttgttgtgtccccacccaaatttcatcttgaattgtagttcccataatccccatgtgttgtggagggacccagtgagaggtaattgaaacatgggggctgggtttttcccgtgctgttctcatgatagtgaataagtcttgggagatctgatggttttataaagagcggttcccctgcacacaccctcttgcctgacaccatgtaagacgtgcctttgctcctccttcaccttctgccatgattgtgaggccttcccagccatgtggaactctgagtccattaaacctctttttctttataaattacccagtctctggtatgtcctcattagcagcatgaggatggactaatgcaagtcaataataatttaaatgtacattttaaaaataactaaaatagtgtaactggattgtttgtaacacaaaggataaatgcttgagaggatggataccccacattatatgatgtgattattatgcattgcatgtccatatccaaacatttcatgtatctcatacatgaaataaatattcacctactatgtgcccacaaaaattaaaatttcaatttaaaaaaattccccttcaaatactaccttcctatttgtagaggataaagaaaggaagaaaaaaaattactattctatagaaacagattcaatcagtgctactgaaagacattatctcttacccttatatttatccccatttgctatagttccacaaaatatcggggaaccccaggcctagccaagttaccctgtaacagattctcttctagtgtgacagacatcattcaaggggacaatagaagttggaggaaacaagtagggtacggtagggtagggtagggaggcatccttaaggagatgtcatcatttatttgattgatgctgcctaacaccaagcctcaagcctagttcagttctccagggatatcctggattttgttacctactcaaaacaatgctgatgaccacttctttgcctaccaagcaagacatattataaagctgggcaagttaagctgtgagaaagtggaaatggtgacaggcgtaattaagcagcctaattttgtgcttgtttggcacagagaagaaagtgtgtccataacgagtcattacagactgaaaggaagggtagggagagagcttcaaataattatttgaaaaagatcacaaatacttttacttttcataaatctccaatgtcaacaaaatgatctaggaaatatagctgtgattttatggaaagaaagaactgaagtcctttttttcagcatagaaggtacttgttcaactacactcctaatatttgagatgagagaacgggagtaggggaagaactactacactcccagtcctacatattaggtttattcccaagtaaatctccttgcccctcctgcatatttttctattgcaccattttttcctttcttattaaaactacctgtctgtcacaatcctactcatcttttcagtctaaactcaagaaccactttttccttgaagcgttatctgactactgcctcctttgtgctcctatcatagctcaacctttgaccctgtgcaaattatggaatttcttttttcttcccatatttttttctcccaccaaattctgagttcgttaggggaaaccctgaggcttatttatctttatgtccctagcacctaacataatgcctgacattttcagaggttctgttaatgctgaccattaaaacctctttcatatccattcttgcctctatcttcttggaattgctatcatttcagcccacacccttttctccagaggtgacctccagagatggaggtcatctttctttgtttctgtcttcttacagttataagcatgtgggttcaccatgtaatgcactgattttcttgcaaacaccagaaaacaaaatggtagcagaagaaagaattgtgaacatcatattctaatacaatctctttgctacacagaaggaaaaaagctcatgcctaggaaaggaaagtgatatgcataaaaatatcagcttggtgaacagtaagtagaatgaaatctagaacccaggtttcctactttctctatcgactgttcatacatactcatttctcgttgtgttctgttctcttagtgaactgcaaatagaatttgtacattctatcacaacttttggtttgggttatatgaaaaaaatgtttttttctaccattatccttaaagagaaatgtaccttacaagtactcgtaaagcaatctttgggcaccgtaggataatttaggttgtagaattttattttaatatttgttttaaaatgtacatattttaaactgcaaccttagtaattaggttaaggtaattataatcatgttaaggtgttttcagatttttaaaattaaagtttatgcaaatacacataaagggccaaaaatttgtctcaggtgagagcagatttattttcacccactttgagacttctgccaattgccttttcacaacaaccaaaagaaaaatggaacaagcattgactgtaacccatgagaaccaggacccatttgattcattcattaacccctgcagccagctcaagaatgtcaagaacagaaaaataattgaggctgggcacggtggctcacgcctgtaatcccagcactttgggaggttgaggcaggtggatcatgaggtcaggagatcgcgaccatccttgctaacacgtgaaaccccgtctctactaaaaatataaaaaattagccaggcgtggtggcgggcgcctgtagtcccagctactcgggaggttgaggcaggagaatggcgtgaacctgggaggcggagcttgcagtgtgccgagattgcgccactgcactccagcctgggcaacagagtgagactccatctcaaataaataaataaataaataataaaaataaattgaaagaatagtttccctagctaaaggtcctcttgactatttttccaagcactgggtagtttgctcctctaacataactctttgagctaatggggcagaggctgcattgggtgtggaggtgaggagaagctgtagaaagggaaagagaataggctcagaccaaaggtcctacccttacactaagaaacttaaaaaaaatctgaatccatcagataacaaatcacccagtccattgttacaaaagtaagctggaattcattcttgaattgcaccaattattttggaatgcattcaggagagcatttccttatggaacatagttgcaaataattaagaaacaatgtggggagagggggccaagatggtagactagaagcagcccatgtgtgctgctctcacagagaagaaacaaaagggttagtgaacactgaccctgcaagccaatcatctctgaaaccacgtcagtatccattaaggcaacagaaggacaccgagagcagagacgagtgaaactgggcaccagtctgtctgggctcaacgcagagccaggagaacttctctaacatgggaaagggtgagagccccctggcgggggggcacactctccacagggacctgtgcaagactaggaatgggagaatcctcctaaccccctatatccctcccatcacacttctagactgaggcagagagctacccagccattttacagaagcaattcttgagtccaaggggacctctacaagtcttgggactgagaacagatcagcaccagcaccatagctccaacagaggtcacagttgtggtgcctgagagcagtaagattgcttcacctccccttaccagacagggctcagcaccagcttctggcccagtggtcccacttcagcctgaactcagccagcagctgtaacttcctcttgtcccaggaaacacccagacagcagggcaggcaactttaccaaacccttccactggtagccaggcaggcaacacctgctagagcttctagcccagtggtctcacttcagcctgaactcagccagcagctgtaacttcctcttgtcccaggaaacacccagacagcagggcaggcaactttaccaaacccctccactggtagccaggcaggcaacacctgctagagattctagcccagtggtctcacttctgtctgaacttagccagcaggtgcagcttcctgatgtcctgggaagtgcccagaaggcagggtggatgactctactcaaccccacctcttgtagccaggtgagcaacacatgttataacttccagcccagtggtcctatttctgcctggatttgcaaggggacacagcctcctgttgccttgaaaacaccctgatagcagggcaggcaactccactgaaccccacctcttgtatccagacaggccactcccactaaagcttccagcccagtggtcttgctgatgcctgaattctacaggaaggtacaacccagtctttccccaggaataacttgaatagaaaatcagggctgacctggtaaggatacagcttgtcttccaactgtcgtccctgcctgagggacccccatagaccagaacacctaacaaaagaaatgtagacatggagacagtaattggaggggctccttcaagacccagactagaatcaaagccagtcaactgaacccaccttttaccataatccaacccccaagggcatctaagaagattaaaaaaaaaaaaaagaaaaacattcaaaggatagcagcttcaaagactgaaggaacatcagcccacacagatgagaaagaaccagcgcaagaactctggcaactcaaaaagccagagtgcatttttaccttcaaatgaccacactagtaccccagcaatggttcttaaccaggctgaaatggctgaaatgtcaaaaacagaattcatttctgacttctatatggataggaatgaagatcatcaacattcaggagaaagtcaaaacccaatccaaggaatctaaggaatataataaaatgatacaagagataaaagacaaatagccattttaaaaagaaccaaactgaactgagagagctaaaaaactcacttcaagaatttcataatacaattgcaagtatcaaccagaatctaccaagttgaggaaagaaactcagagcttcaggactgcttctctaaaataactcagtcagacaaaaacaaaaaaataaataataaagaagaatgaatgaaacctccaagaaatatgggattatgtaaagagaccaaatctatgactctttgatgcccttgaaagagaggaatagaaggcaagcaacttggaaaacatgtttgaagatatcatccatgaaaattttcccaacctcactagcttggccaaaattcgaatccaggaaatgcaaagaacctctgtgagatactatacaagatgactgtccctaagacatacagtcatcagattctccaagggcaaaatgaaagaaaaaatgttaaaggcagctagaaagaaggagcaggtaacctcaaagggaaccccattaagctaatagcaaacttttcagcagaaaccctacaagccataagagattgggggcctatattcagcattcttaaaagaaatcctcaccatgaatttcatattcagacaaactaagctttattttaagtaaaggagaaatcagaccctttccagacaagcaagtactaagggaatttattaccagcagacctgccttacaagaggcccttaagggagtgctaaatgtggaaaggaaagaccattaccacccaccacaaaaacacacttaagtacgcagactagtgacagtataaagcaaccacacaatcaagtctgaattataaccagctaacaatatgatgatgggatcaaacctgcacatatcaatattaactttgaatgtaaatgggctaaatgcccaattaaaaggcatgaagtggcacattggataaagaaagcaagacctaactatgagctgtctacagagactcatctcacattcagtgacacccataggctaaaggtaaagagatggagaaaaatctacaaggcaaacagaaaacagaaaaaagcagggattgctatgctaatttcagaaaaaaaaacatactttaaataaacaacaatttaaaaagacaaaggaaggcattacataatggtaaagggttctattcaataagaagacctaactatcctaaatatgtatgcacccaacacaggaaaactcagattcataaagcaagttattagagacctatgaagagagttagagaatcatacaaacatagatttcaacaccccactgacagtattagacagctcatcgagccagaaatctaacaaatgtatttgggccctaaactcaacatttgaccaaatgggcctaacagctacagaaccctccaccccacaaaaaaacagaatatacattcttctcatctgtacatggcagatatgctaaaattgaccacacaatcagccataaataatcctcaacaagttaaaaaaataacaaaatcataccaaacatactctcagaccacagcatgataaaaatagaaatcattactaggaaaatcactcaaaattgtacaattacatggaaattaaacaacatgctcctggatgacttttgagtaaacaatgaaattaaggcagaaatcaagaaattccttgaaattaatgagaccaaagatacaatataccagaatttctgggatacaactaaagcagtgttaaaagcagagtttatagtgctaaatgcccacatcaaaaagttagacagatctcaaattaacaacccaatatcacaactcaatatcctagaggaactagagaaaccaaagcaaatcaaccccaaaactaccagaagacaagaaataaccacaatcagagctgaactgaaggaaactgagatgcaaaaaaccatacaaaaaatcaacaaacctggtagtttgttatttgaaagaataaataagattaatagaccactagctagattaataaagaaaacagaacaaataaacacaattagaaattacaaaggggacactaccactgatgatacaaaatagagaaaactctcagtgactactatgaacatctctatgcaaacaaactagaaaacttagaaaaaaacggataaattcctaaaaacatacaactgccaaaaattgaaccaggaagaaatcaaatccctgaatacaccaataacaaattccaaaattgaatcagtaataaaaagcctaccgacaagaaaaatcccaggatttacagatggattcacagctgaattctaccagatgtataaagaagaggtggcgccatttctactgaaactatttctatataccaacaatgtcccaactgagagccaaatcaaaaacttaatcacatgcacaatagccacaaaatgaattaaatacctaggaatacaactaaccagggagggggaagatctctataatgagaattatgaaacactgcccaaagaaattacagatgatactaatggaaaatgaatggaaaaacattccttgctcatggataggatgactcaatattgttaaaatggccatactgccaaaagcaattaaatagattcaatgcaattcctatcaaactatcaatgacattcttcatagatatagaaacatctattttaaaattcatatagaaccaaaaaagagcttgaatagccaaggcaatcctaagcaaaatataaaggtggaggcatcacattacccgactacaaactatactacaaggctacagtaaccaaaacagcatggtgctagtaaacaaaacaaacaaacaaaaacagacacatagaccaatggaacagaatatagagcccagaaaaaaagtcacacacctactatcatctgagctttgaaaaagtggacaaaaacaagcaatgaggaaaggattccctattcaatgaatggtgctagaataactggctatctgtattagtctattttcatactgctaagaagaaatacccaagactgggtaatttataaagaaaaagaggtttaataagactcacagttccacatggcttgggagacctcacaatcatggtggacagcaaaggaggagcaaaggcacatcttacatagtggcaggcaaaagagtgtgcgcatgaatgtttattgtggcactgttcacaatagcaaagacttggaaccaacccaatgtccatcaataataaactggataaagaaaatgtgacacatatacaccatggaatactatgtagccataaaaaaggatgagttcacattctttgcagggacatggatgaagctggaaaccatcattctcagcaaaatatcacaaggacagaaaaccaaacaccacacgttctcactcataagtgggagctgaacaatgagaacacatggacacagtgaggggaatatcacacaccaagtcctgttggggagtgggggctgggggagggatagcgttaggagaaatacctaatgtaaatgatgagttgatacatgcagctaaccatcatggcacatgttaacctatgtaacaaacctgcatgttgtacacatgtgccctagaacttaaagtatataataataataataaagaaattcaaaaaaaggaacaaaacaaaaacaaaagtgtgtgtggaggggaactgccctttataaaaccatcagatctcatgagacttattcacttcctgtgagaacagcacaggaagaacctttccgcatgattcaattacctctcactgggtccctcccatgacatgtggggattatgggggctacaattcaagatgagatttaggtggggacacagccaaaccatatcactatccatatgcagaatactgaagctggaccccttccttacaccatatactaaaatcaattcaagatggattaaagacttaagtttaaaacctaaaactataaaaatcctggaagataacctaggaaataccattctggacatagttcctggcaaagatttaatgacgaagataccaaagcaattgcaacaaaaacaaaaaatgacaaatgagatctaattaaagaccttctgcaaagctaaagaaattatcaacagaataaatagacaacctatagaatgggggaaatatttgcatactatacatctgaaaaaggtctaatatgcagaatctataaggaacttaaatcaataagcaaaaaaaaaaaaaaagaaccccagtaaagagtgggcaaattacattaatagacacttttcaaaagaagacagactcacagccaataagcatgtaacaaaagtgcttaacatctgtattagtccgttctcccactgctataaagaaatacctgagactgagtaatctatgaagaaaaaagttttaattggctcatggttctgcaggctgtacaggaagcatggctgggaggccctaggaaacttataatcatgatggaaggcgaaagggaagcaggcacatcttacatgtctggaacaagaggaagagagagaagggggaggtactacacatttttttttttttttttttttttttttttgagacggagtctctctctgtcgcccaggccggactgcggactgcagtggcgcaatctcggctcactgcaagctccgcttcccgggttcacgccattctcctgcctcagcctcctgagtagctgggactacaggcgcccgccaccgcgcccggctaattttttgtatttttagtagagacggggtttcaccttgttagccaggatggtctcgatctcctgacctcatgatccacccgcctcggcctcccaaagtgctgggattacaggcgtgagccaccgcgcccggccggtactacacatttttaaacaaccagatctcatgagaactcactcactattatgagaacagcaagagggaaatccaccactatgatcaaatcacctctgaccaggtccttcttccaacactggggattacaattcaacatgagatttgggtggggaaacaaatccaaaccatatcaatatcactagagaaatgcattagaaaaatgcaaatcaaaaccacaataagatgccatctcccaccagtcagaatgactattattaaaaagccaaaaaataacagatactggtgtggttatatactgcttgtaggaatgcaagttagttcagccattgtggaaagcagtgtggtgatttctcaaagaacttaaaacaaaagtaccatttgacccagcaatctcattatggggcataaacccaaatgaatataaatcattccacctccaagacacacacgtgtatgttcattgcagcactactcacaatagcaaagtcatggaatcaacctaaatgcccgtcatagtagacttgataaagaaaatgtggtacatagacaccatgaaacactatgcagccatgaaaaagaaccagatcatgttctctgcagcaacatggatggagctggcagtcattatcctaagcaaactaatgcaggaacagaaaatcaaataccacatattctcacttacaagtaggagctaaactttgagaacacatggccataaagaagggaacaacagacactggggcctacttgaaggcagagagtaagaggaggaagaagataaaaaaaatatctatcaggtactacacttattacctgggcgatgaaataatttgtacaacaaacccttgtgacatgcaatctatctaaataacaaacttgccaaaaaaaaaggtggagatgaaatactcaatctctctctctctgctttttccaagtattttttctttcagggtgctaaataaaatatgttaacatataatgccttatttacagaaataaaagttagttattgaaacaatttgtaatttagttcttgaagtaagaaatacaaaaaggtgataattagggcagttgaaaatcagcattatggggatagatgtgttttccttttgtttccaagagctgggcagaccatgctgaagagattcagttctctgaatttgctccaagtggtacggcttatatttgtaatgttcctttatctcttgtcacaaagcttcagctcatcaggtaaactttaaatacgtacatcttgactcttctaataagatataaaaactcatcaatgagtccagaaattagatttgaaatctaagtattatttcccacaaactaagagtcataaggaagttctcaatgtgtacatatattttagtacatgtgctgagtccaatcatgtatttttagtaaatgaatatatgtcaatttaccaatatttgaatgtgtaatttcttagtaaacaaaaggttaattcagtcattcaatcaaatattatttattgagttgctactatgggccaggtatcattttggttttggaaaagcagacgtgggcagtgactttgtgggaggaggaagggagaacaagacagataagcatatagatatgtaaatctggtggtgatatgtgctatgaaatataaagtgatcaggtatatgagtatggggtaggctgggaggctttcagagaggtcaagaaaactcagagaaggggacatttgaataaagacctgagctaagtgagagagtaagccatgtcattatatgaggacagcatccaagcagaggcaaagtataattgaaagtcctatggcaagggtgtacttgtgcttggaatgtttgaggaataatgaagagaccagtgtagctgagctgggcaagaggtaatatgtcaggtgtcagaaagatagcaatggggccagatcatgtaggtcttatataccatgaaaccgactttgtgttccattctgagtttctgagtttctacgaaacaccattaaaacaacatggcagacctggaaatccctcagcaatacccacataagaatctggagatatgccagggctgccttgccttggcccacaatgactgccaaggaaccagatgctgttgcttgaaaaataatgtacactgcccagcttctatgcccttcgatttccatccataatgaagcttccaaaagaacacagaataaaggcaagcatgggtaactgtgtaatgacaagaaaaaggtctttacttaaattgtgaaatatatatacttgataaaataaaattgcacaaaaggaaagtataagattattcgaatgctattttttcacttaattattggacagaacaaatattactagttggaaatgaacatgcttattatatcaaaatgtttttactgtttttaagctaaactaggtatttaatttctcagcagactttgaaagattgcaaacaaaaatcatgctaatgaacaaaaataataatacatagatttattaaatataaatttcatgttaatactaaagtaaaatatgtgtttgttataaatatcgagacataaggaagtattttgaatttacttataagtgatcaggtagactagacaagaaatataaaatatcgtcttcttactttcttcttacattttcttctgtattttttaaattaaaaaaaatgttttaccccatttcaaggcaactttactaaccatcactttttaaactgcaaattattagtactgccaactggagaacttcagcacattttgcagcacgtaaatatgccatctgtatcctacagtaatacctgtggcttaactctctaattagctaaagaaatgataccttatatatatcaaccatagtaaaaatcattcaaatagtatataataagcatacaatgtgctttattgtcattagatatgatactgatatacagcacaataatccaccttgaaaaattcctatagcaggtaaagcaggtaacagttaatataaaagactgaaaattgcacatgtaccctaaaacttaaagtataattaaaaaaaaaaacattctcatcacaccaaaaaaaaaataaggcgatagatatgttaattaccttgattgactctttctacaatgtatacatagatcaaaacatcacactgtaccccataaatgtggactattattatttgtcaattataaataaatatttaagaaaactaaaaaaaaaaaaaaaaaagactgaaaaagaaatttagaaaaaatgaggtcttacaagtttctatgagagaaagaatagtatagtaaaccactgttaactagctgtgtgatcttgggcagttatttaatctctctgggccttacatttccacatctgtgaaaatggggataacaatagaacctactctgaaagatttttgtatggagtaaatgaattaacatgcagaatgtgcttaaaacataggcacattatgaagacttaatactcataggctcttgttattcttaaaggtacattcttctttaacagaaatcactctaaagatcttattcagaaaaatacttattggcatttttatttaatttagcaaaaatatattactgatgcaaagatgaagaagatatgctgtctttcaggacatcaaagatatgctgtctcacagcacggatgggaagaagacagggagaaaaacataatataataaatggtataatggaagcatttacaacttactactgaaacaccatcactgggaacaattaatttggacagaggaacagttaggtaggctttactcacagtgaagccccagaaagaggccctttgttaactaaaagtttaaaaatagccaggcacagtgcaacatagggagaccctgtctctaagacttttttaaaaaaattagtcaggcatggtgactcaagcctgtaatttcagctattccagaggctaaggtgggaggatcacttgtgctcaggagttcaaggctgaagtgagctatgattgtaccacggcactccagcctgggcaagaaagcaagatcccatctctaaaaaaaaataataataattttttaaaaatctagcagaattcacaccagtccctgcaatgaggaagcgtttgggctaatggagtttctgttctgtatttagtaatatctctcctttcagcccattcttttggactcgtacccctagactgtatttcacagagctaagatgttcacactaagggccagtgtggtgttgagagtcttaagatttataaaatgcaccacttctctggaaaaggagaaatcacccttggctcttcatgtagggaacaagaactttcttttatcctttttattgtcaatttaaagatgacacaaaaaaaatgaaggaaaaaatctttaagcattcacagtactaatttaggggagatttttctaaatcttaatatctcctctgtgcctgccataacacccctagaaaactctcattacatgatgtaaaatcacagctttagttggttaagagggcataattccaagtggaccatggaatatttatgtcgctatgcagctctttgaaggaataatcttatgtttttatgcctgttgtgggtcagaggttcaaatcagcacttctttctgtcacttcttatgtgttttactataatttacagctcagcaagatgaatcataagacaaaagtgtctattttatttcagcaactaattctagttaatcaaagatttccagcccagcaacccagcatgaaactctgcatggaaaatatgaggagaacaaagcattttgtcaaataacatatctcatgatgtaaacacatatgtctcttaaaggaaattttatcgtttccacattatcggcatacaaaaggagcattcttgtcacagacctggtgcgactgtggagtcatcgtcactggaaacaagagcctgattaggttcccacacagatatgaatagactttccttttttagaggaatagctgcttttattcctttttaaaacagactggtaattgtcaccctaaaaacactgaattgtactagggcaacatttgtttctgctcttttttcccatctttttagaatcagccaataacattactatcccttctggttggtcctcttctggaaagtctgagttaatccacagctgtgtgaatgtgaaaaagggacacagcaggctaagtctgttgggtctcttgtctgctaataaagtgaacagtctgcaggacagatgttaagaggatctgttaaataagtcagtggcagagatcctgacctctgccaaggaacattttattattccagaaaggggcataattgcaaggcattaacaattagaagaaccatagcttttctttatagatttcttacttcttgcttcattatttggttgaaatacagtatcaaggcccattcactgagaagcaatgtgctaaatatgattgggcttagtataaactgcagattacaggatttccccaaatccccaggaaatggttggaccttggctttgcttcagtcttaaacagttttgtttattcagcatgtatcattacactatttgtacagtctcatttgccacagggtaccattgtactaaagggactatcaatcttaccaaacacagtgccttaactattaaatctagtgtaatgggaaatgtaaactagagatcaaattaagaggaatatcacaccataaagttgttcactataccttatactactttaccatttatggtgtgaataaaatcatgtctaccacatgcattccaaattcccttgtgcagtgtaaaaggcactctgtgatctgaccccttgcatacctttccaatttcacctatgattgctcctgtacactcaggctgtgccaactgtttgtcgtttctgaatgtgccgtgctgtctattgcttctacacctatgggtagctattctctttgtctggagtgctttttctcttctctgcatctttgccattctgcatccttccccataaacctggggaacttatacctccttttaagattcaattttaacatcaccttatccatgaagattgccagtacttccccagggggagctaagcacttcctcctttcatagcatttcactcggggaacacatctattttaacaattatcacattgcttactagattgtgggcccttcaggggcaagagtcaaattctcttgatcttagtgtgcccaaaatagaaaagagtgcatactacagagtaggcacttaataaacatttgaggaatcaatctatgaatgaactaattaaataattactcttttcatcgtgttagcataagcttatattctagctttgtcactgctaccagcactgtaacagggtcttacacttttaatgccttactttgttttgttaatgaataattttcattagattggtatattcgcttgtgaaaaaaatatatctctactaatactgatcgctcattgactcccacttagaataggtaggagcatgagatatactgtcctcttggccaattcagttgaatttagttaaatctatgtacaagaagcaatcaaatttagttatttacactgttggctaacaattctatacatctaaaccaggccacagactagctgtgtggctttggtcaagttaatctatctctctagacctcagtttcttcaactataaaattataagatttatatagcacttgacagtgtataaagcacttttcacaaacattttcttatgtattcctcacaacttccctatgggggtatttttcctaatcccatttgataaaagctaggtaccaggaagattaatttgtccaagcacatggaaccagtggtagagttgggacttgaccctcaaagcctctgaagacctttctagctctgaaagtctatggaattgtacaatctcattgcctatttgtgaaggctttattttcaataacatgacatttgtttcatgattagtgggaaatctatgttaaagtaccctaattgtggagtggctgtcacttcttgctaaagagcactgtactgggcctcatgctttttgaaaccaggaacagtcatcaggcatagaaattaggacaaaagggtttcaaactgcctatacacaatcaccttgggcaatcaataaatcagtatatatatgtacatacacacatgctatacatacacacacatctcaaatgattagccctatactatctgttcctatcaccttaaagtattactcatttaatttatttcttcctcagactattactataagagggcagtaatttcttagcttcattgcttaaaagagtacctaaggtacatagtacatgttcaataaatatttttcaaattaatgaatgaataagagagatacaagcagaagagtatggacaaacatatttattgagcatctaccatgcagcagacactgtactaagcaatttgcttatattatctcatttaatcctaaccccaaccctactgagggggtgtcattatccccagttcacagacgaagagactgaggttcacaggaaattagctcatgatcacttagcttttttaactgcagaattcttatggaaccaagaagcaccactttcctggaacctctaatccattcaccattgtatagacagagaacatgtaagacagcaagccagctggtaaaccaagggtagcatgttgtttcaataaatggctacaaatcatcatctgatgatatatagtcatctttctgtttcacagtggggtatgtctgtatttggcaatagagtttcattaatcaggaaatggaggcagaggtagatctaaaatcaggagggtttggttggatataggtgaatgatagatgactattttgttctgcatttaagaaatgcctctttatcaacaccattgataaatgaacggagaagtgaagaatttccacccaaattagtcacatttagtcttctactatttcaacaaagcttctgtctcttggtctcaggatctcactctcttgccttctctattgtgttatgtctgagccaatgacataactacacattatgaatgtactgcctcttgggccctggaacaaacccctatttggccatgaagaggatgttctgagcaggtgaacagcaacactgagagaggatatctttttctttgtgagctaaggagctcctcaactctggagggcaatcccagtatggtgaggactggttggggcacatgctccattccagtgacagtaagtgtttctccttttcttaaaaaaaaaaattgctttttttaaagcagaccaagtgataaactattaagaagctaaactacctttcttatagagtttttaaactgagcctctgagaaggagtttgataaaattcaatgaagtaatacctttgtccatttgagcattaaatggcccattgaaatacagcttagatggagggaatttcaaaagacagtactttccaatttttttagaaaatttctctcccagctgactagagcagagcttacaaaatgcagctcaatcactttccacagtctctcaggtcagcctctcaccagcgttaattaaatataacccccttagaatacgagaggttaagtgagagcaacatagcattcttatccaatacattactgtgaacataaatgaccataatctgtttataagaagacttcttttagcacagaggtctcactaatgaaaaattataagaggcaaagcaacataatgtgacaactgttcatcacaaaacacattttaaactacccatttccacatccattgtgcttaaataacacatatcataaagaaaattggtgtaacagatggtttcagttctgggtagcaaatgctaccagttttcagtgtgataaagggaaacagtaaaagccagtacataattcaggcagtctcttacctaaaggtcttccttctcctcaagttagagacactttccccacaagcttcaagttttagtattttttcttttttaactagatgctgaatcttctatggcacaacttgaacaaactctaaaactgaataattgctgaaacaatatgtttctatactagccactttaaattagaaaagtctctttaagctacaggtttatggttctaaaaagttccatgcactgcccagagctatttgtaaattaaatcgtttaaaataaagctctttaatactctataattagtcttgtctctctgaacatgactttactgtaaatgctccttcttgactctcctattgtcccaagattcctgagaagaaagcagccaggcgataattcaacattattgctgcttcagtgcactaatcgcttaaagagcagcaaagactctgtgctctctgccccacagttcccgcagactcctggcctgaggcaggcatcgtgacccagcaacatccagatgtcaagaggaatacccagctcctaatgcagcaggcgctccatcccagtatggtcaaacatctgcttcatctgctggcatgcaacctgctgaacatgctcagagtgcatcccagactagggatgggcaaggatagagctccccagctactccaggagactcatcaaaactttgaaactataagacaggcccagaaactctcaaaaaaacagggttctggcattcagcaaaaacatactaaacattttcctaaaggaaagccacggaataagataagacagtttttatcacagtagttctactgctcattaaattctcttaggtttgacgtttattctggatgttaactggaaatttgaaaaatacgtgaactctttgggattctgagaatgtcatactgactttgaaatttttctcttttataatttaattaagttgcctttaattcacttgaatattataacaagagaagaataaattatacaagaaagcttctattcctatataccagtcaacagagcttaatgccaagaatcctgaccaagaggtaaaatttaaaatacacttaaaccatctattacagtcctattttgtttactagaatagtaatcttgtctaagtcacttaactcttctgagcttcactttcttcttccaaaatatgggaataatattaaaacatttacacaaaggctaaatataaattgttttttaactgtaaaaggctataaaataggtatgtgtttatacatgtatacatatatgtatgtatatatgtgtacacatataatattaatactactcatgtttcttttaaaaattttgttttagaaagaaatttagtctcctttgtaatatccaatttacacatcaattatagctaagaatgatttcattcatcctatgagatttcggtaactagcatcctataaaacctaatgaacagttcccaggttctcaccaaatttcatatttacttcactgtgaaaggcagacttatatactattaaactaaaaaataatattcccttattgacagcctgagtacatgatatgcttaatactactgaagagagttgtgactgttctagccagaagtgactggctagaataaaagttttagtcttaaatatcaaagtgaaggaaaaaaaaactgaggataaacagtctaataggtcttaattttaaaaaattttcccacccagattgaggcagatgggataggtgaggatatttctgctaagatgagtaagatttgcagtctcatttctttattatatattcctttccttattttctcttctcccactagaaggtaaaattctcagagggcagggactttgttttattcattgatacgtccccactatgtaaaataggtgttctcaatcttcgcactattggaattttagactgtataattctttgctgtgggtggctgttctgtgctttgcagggtgtttagcagcatcctcaccctctagacattgtcaaccacacccttgtgggacagggtggggggtggggaaagttgccctcagctgaagactgctgtctagtacaggacctggcatataatacgtgctaaaaaatttttttgctgagtaattgaattaaatttattgtgttaatttgcttgcaaactttcttaaatacttttcttagggtagttttaggtttgcagcaaaattaagaggaaagtaaagcgatttcccatatactccctgttcccatacatgtacagtctcccccattataaacagcccccacctgagtggtatatttgttacaattgatgagcctacattgacacatcataatcacctaaagtccagagtttacattagggttcactcttggcgttgtacattttatgtgtttggacaaatatataatgacatgtatctaccattatactctcatacagaatattttcactacataatatttcactaaaaatcctctgtgctctgccttttcacccctctcctcatcctaaatccctggcacccactgatatttttactgtctccatagttgcgccctttccagaatgtcacatagttggaatcatgtagtatgctgcctttttcaaatttcctgagcatgatcatttataaactctctttaaatgtagattttgacacaactctaatgatacaataagtgttaagttattccaacagttacattcaaagctaccacatgtgatttcaagtaagaagaattttaaaaggatgtaatacttcattctttctttaatttaaatgagtagataaattagagggaaaacttgatagggaatttgtagggtgacagcagctctatttcaaactggcttcaaatgagcactgtaggcttgcactttgtatagtttgagatagtcaaatacacggatatatttgaagcaataaatttttcatacatatctgtcacttatttacttttgttttagttcataccattcaaggtcaatagctctaggggaattgctgacaaggcatcaaggattatggtctaggttaatatagacattgtaacatcaacctgtagcctgttggttacaggtatggtagctggtgctataagagaaacacacagtgagaaatgaactcaatgcagtttattggaaattaagaattctagtttaaatctttgcttctccaaatgaatatgaagagagaggccttaggaaatttatttggctctaacttggttccatttcttagtccattaaatggaaatgcaaatacttggttaaatatgcattgaatggatatcagtatcaaataattcatgtttagaaaaccggggggaaagcgttaaattagttcctctcaatttgactcaagatgactctactgctgtcaccaattataagagaagaatgaaaggtaggaacatatataatgattttttaaaatccacatactacccacatagcacctgatacatatttagtgcttgtttatttacatataattgagaaaagaatcctttattaatgccatttaagcttgggaagatacagaagagaatccagttattatcctaatctttataatctagaacagctaaaataaagcaagatgttttcaaatcagtacattgagtttaaatcatcataaattttccctgagtttacctgtagcatatgaactcttctacaaataaaacagaaaagaggaactggcagaacagtaatagctatgtgccagctctagtggtcagaagtgaggagaaaccatccaactgtagcttctcaatctcttttaattaaaatatcgtaaaaaatgtctttctcctgttctgcctattctgttacctggaaggtcaaatattttatcatatatttttctgaatataaatttcctaaatgttgaatatcctgacttattccatggttggaaacagaagtgaagcattttctaaaatgctagaatgttttgctttcaaactttctaatgtacccttaatcacatcatctctcagaattccaacgtagctcattacaacatatacatacatgcagatatatgatacataatatcaaccaaaaatattttaaaacttcagtttggtaaaacaggaataaaaatacctgtcattattttagaaatcatcacatcttacaagaaatctatgtaaatgtaattacatgcgttcacacactggaagctgcctattgagtggattaattagtggggctagagctaaatgactgttgacaaaaatcttgtatcaggagagatagaggactacattggttttgagtatagctgactatcccaccaatcaaataactcaaacacagtgattaacagagcttatgtgagaagagccaactctctgaactttcaggtattactttaaaaccaaataaaaagcaaagttccaaaagaaaatccagtttatccaatgttttagtttgagggtgggtataaacttctgcttcactgactacaatggcaagctagatttctaagcattaggaattgcctttatatttggcatccttccctaatctacctatatttctttagcctccattaggattcacttgatacctgcactttttcttaagaagcctatctagaaaagttgttgacataaaagagtgtctcttatagacagagcactcaaccaaatattttccggaaaaaaaaaaggttttcaaaggagcttgggtcccagatgtccaccaaagatgaaatgcattaattcgtccattttgccaaatactgtgctaggcaatgctaaggattccacagtaaacaaaagagacaaaaaattccctgaattaattaacttatactctagtaggttagacccacccatcagaagtactttagacaataaatctagagtagaattgactgcttactgaggttactgaaaagttttacctattctgatgatggttcagggaacatttgtggaaatctaatacatgctttattattgcatttatcatttataagaaccctgagaatgtatattatgctcattttacaatgaaaaaaactgcaaatggaggtattttgtaacagtgcaagacaacagagcaagaaagttatagtggaaactctaatccaaagttctaattccataaatggagttaattccattagcctacagctcatctaagcctagttgtaatggtcctcccaaattccaccacactcttaaaaatcaagaaaagagtcagaagggtgagtgaaggctgattaagagaaaagcatgcattctcttcaaagcagagccccatggctggcatcctcaaaacaagctttgagtcagttcattcctctttctccattgggtagccagtaataggtcaccctaatcatctatttattccaccctcttctctattagaaatcacaactttccaagactgcccagcaaagctaactccatcaccctcccattcccccacaccactgaggcatctttacaattgcaaataagaagacagggtacaacagacagtgcagagcctctaaatacaacatcataaagactcaggctgcaactgaaatagaaatacagcattctcaatgctgatgggcacttctttactttccatttgtagcacaaaaattgacaatatcatttaaataaaatatgtgcttgtattcatttttgcaaaaacttcaattgttctcctccatctttgcaaacttggcaagacttcagtagtttcatttaagaataacgtatggttgacaggttttcttagtgctttaagactctaactatattcctttcctcaaatctcccctaaactacacataagacccatcaaataacagtgaaaattgcatttatattgacatttttaattttcttatacaattctttcatttaggctactatccatactatcattataagaaatagtctgttaaaatatgttccaactaaagcttagtgaactttaaatgctagacaaaaatcattctctgaagctaatgaagacagaaactctgcctgtaacaatattaagtttgtttttttctggtgattcagagaagtgagcaatctgtcagtaatacattgagtgaaattacttgtcttggaggaataactgctgacagtcgctttatctcagggctgacccaaacatcttcctgctgacaaacaaattactatgtctaactttgaaaaggtaactggcttgctttaattttgattggtctttcagaatctcttatacatatactgagccccatccttcattgtatttttttaaaaaggcaacaaaagtgttttgggggggacaggtttgaattaataagtaataaaaaatagtaagaaaagaataaccctattatttgatgctaagaaaaagaactgatacgcttccttccaagactgttatgtggatgtgactggtaagtcttaatgtctacccaacattaagactggcagtgccgccagtgactgactgggtgagtgaacacattactgagatagtatagtaggaattaattttcttcaataaagtgatttttaaggctcatatatttcacaatctaaacatatgtcactgtttcataaacaaaataaatggattaaaataatacattaccaatatgctgacacatggagatattttaattagaaatgcttaagctgtgtgatatctaactgctgtatttgctaaagagaagcatgcatcatttaataagaaggcatgaggcaggtggatcactttgcatatggtaccagattttgtttaatataagctacaactatgaggcaacactactccccattaaaaacaaaacaaaacaaaacaaaattaagggtctatcatattgaaaataaccatataaaatgaataaatacactgaagtccctttttcattaaaaaaaaaaagtcatccagagcttagttcccacgacaatatttcttcagaaacaatctaacatcatcactatttaaaggctaaatttacatgactgcctcattatactggttccctttccttaacattctttttgacttacttaaggaccaatgataacatagctgaagaaagcaaatggcaactggtcctgaaatttatacgggtgagagaactggaataagcagcagtataatacattgtttactgtagcaagtgctctctgttctctaaaggtcaaaagcattgtaaccttagagttacagtttctgattgttcccagggtttaataaattatcaaaattaatggttcaaacccctcaaccttcagatatatgagtattcatgcctgcatctgctgaactgttcaactaaaaatagcactctttggccttctttctcctaatattgtgcccctgaggcagagaaaaccatgccttagatcagcacagtagtattttaaaaaatggtctttacggaatcttccttattttaaagaaagaaagtaatggcatatgctaatataaggagagtctttcaattttaaataacttttctctacttgataaaatttcagggtatacttaatatataccaaatgttgttaagatttacccaggctcattaatattagaaatgacaacctttgaaggacaaattaactgtaacatgaagtagagaacaccatttctgagtaatgcatgcagtggggtgggggagtatatgtgttataagctttccctcctaagaatctctgtttagaaataaaaccagttaatatcattgtaatgctttctaagtagcaatagtttatcatgatcatgtttcttgacataactgtgacattttagcttatcaaaggaggggagaagaccctagctagaaaagaaagcagatttaaataacaataaaccaagatattattaaaatatccctctaccctcgctcaagatttaaaacgttactatctagcaccttagatatgggtgtctactatgctattcacagatgtcccaataaacatgctatactcatactaggaaagtttgggaaacccatcttttaaacaaggtcgatcttttctaaccagagtccacatgagcaaacagatcaaaggtttcctgacatgcaggaaaaaggtgcaaaaataggaggtaatagaacagagcaagagtaaataaaaactgaggaaactatcaaagcatccagatttaaactgcaaagctatgaaggctcttgcattaatggtttacctgtttagcctaattaaagtgacagacacgtgacatatgctgtgcttctagatcagcatcactacagcactacagagctctgacactcatatgcatgacatcatggtttccagaaacccaacagaagccagatttgacacatcagggatcagtgatggtgtgggggttgggagtggggggtgggagagaagccgatctgagtgaaaaattaggcaaaagaagagactgggtagaaacctggctaagggaagattgatgggatagaacacaacacttcaacagaaaatccaaaagaaaagtccaacaggaaagtccaacaggagagaaagaaaagtcccaccaggagaggaaacagaaaagtccagcaggagaggaagtcttgagtttgagccaaggctacctaatttctcattcttccaggcatttaaaagctctcaagctgactgtcctgagtagataagcttgctagttgtcatcacacatataaacttgttcctaatgtccagtcatttctttctagctctcctaggcatagattttcagaatgcccagaaatgtggtactcactctacagccaaaagaaagccttagaaatttcttctgtctgtatagaaggcaggagatattctgaaagtatgtgtctaatcatgtctgagtggaaaccccctctctacctcttatgtcaaagcaaaagaaaagagggaggcagttaacaagctctggaattctaccttaggctacttccaagggggtctttggtcttgtctcttccttttcttaggagtgatcattccctatcattttccaaaaaggtagattcacaagcagcagaaaaggtaacgtcaaagggacctttcattgactacatagtgtttgagctatacagaccagcagagccatcagaagttaaatgtacatcttgctagatgcaattattttcatttttgggttgagtttcccatcctaggttggactataaaatctgctattatatctaacccagagaattaaagtgtgtttcagtttgaggtaaactgtatccactttttaaaaaattcaacagatagctggaaattctccaatatgagagtcccagtgagggaccccggtgaggcagaaaaggaattaagcatgaaattggagagagaaggactgggttcttatagaagaaaaggtcttggttttcataagccatcttctctcagtggtaagaatatcccaacaaaacaacaaaggactctactggaaggtgaaatatgaaaagaatactacagaagtttgtcttggaaaaagcaatcatccaggcccaggcacccacccctacttcattctgagaaaactgagtacgtagaattagaaatcctgggcaataaccttgactcaacgaatattttatagccttggttaaataacttaacctctccaaacctcagctgttttatctatacaagcagaattatatttgatcaaatttacagggttattctatggtcaaataattttttaatgtttaagtattttttaaaaaatactatacaacactatgcataagaaaatataaaagagtgagggaagaaacatggttttgaagacacttataatgtaaagcttttgtgtgaatatatatggcaaagaacaaccttaattcaggggcattgctttgggatttgcttttttctctgaaagaaaaggggcaaaagaagagcctccttaggaatgagaaaaagggaaagattaagttcagtgtttaggttgagtgtttgccactttaaaaaaaaaaaaaaaaagcctagagtatgactgaacaatccagtccccaacccaatgaagcatcaatggaagcattcatacctcaatctgtttgtggttgtaagagtggccaccaccatgttcaaaggtgtccaaattcctgccaaaacggtcacttaggccctttagcctttggttaatttgtgggtgggagacatgacccttctgtttagtagcatattcagaaaaaaaaaaaaagacaaaacatactgtcagaactcatgaaacagaatacatatttctaaatccagggtattgaccacatcaaaaaatagaaagtagaaagtttaagactcagtttctttcttttacagaaatttggttacagtatcaaacagtggcactgatttcttgtttctgcctctgactcaagaagatactcaatagcacagctataggaagagaagaaatatattaggtttataatagtgagggttctttttagacttgcaccaactatagtaggtttcagtgttagtagcgtgaaaggtgaaggtttgcaagagaggtgaggttgctgctcttcttaggcgaaatttctagctctgctaggcagcccataatgggttacatctttataacttcctggatcatgactcatgacaaaatttctcaaagtattgcagaaattctttatttgcagatccagttggaaacattcaaaatgatgttttttcatgggacaatagttgtatactttttatgttcaagtcacatagagactagcaacacaaaaataaaaatgcttcaccagatgctattctgtagataatttaagaaaactcaaaaataattatagtatattttaagaataaaaactatctttaataaaactttctactatattgaagtcaagttgttgattatcttatattctctaaatatccaaatactgaatgtttgacttattttaatgatctcagctttttgtttttattaatacaaatatacattcatattcaaagtcaacctcccattcaagtggtagtagtagaagggtataatgatcagctattcctattccaaactcactttattgtgaagaagataaggtgtaaatgatttttcaatcagcttccaaaacactttccccccaagtttagctttataaataagaaacaccaatgcaaaatttatcagacaccatgccctgacttttgaccctagaaagggtgaggacacatatattaaggagcaatgcatttacaatttacaaaataattatcatgtaatttgaaaataacaaccccttattctatgagctacaagaaggaaaaaatatccaacatcatttttgtttcaatttttatatgcaaaagctaatctggacataagtggagacacagatgaaaaactaacaaggaaaaagctaacatgtatgcagtaacaactagccattgaaattgtaaaactattcactcatctgatagagaatacatagtattaagtcctaatgtgatcttttcctttaaaaatattgaaactggcagttttctcttctatttgcattacgataagcaaataaggtgttaatccttctgggctatgcttaaaaaattatttaacattcaggccattatttagcatacagctggttagcagttttccactaaagtactggctcatatcccacatttttttcttctggcacttacctggagctgtaaagggctgagtccagaagcagcagcagctgccattgttgatggaatgaactgtacggggtagttatcacctgtcggaaagaacaatgcatacaggtttagacaatgcacagggaattgcagcagacaagtacaaacatggtccttggattgcctgagctttacaacattgctctaagcccaaacatctgcagaaacaaaaggcttagttgggcacagacttgcagtgctgccttggaactttttgttaacagatagctggtaggcaaactggcaaaacatgaatgtgatgttaaaaaaacttaaatgtgcaattcaagcatgttcactccattgcgaatcttgtaatacatcattttttaagagtaaaaaaatatctttaagccaggctgacactcagtacactgggaaagcattaaggcttttatattagaacaacaaaaagttttggctttgtaggcaaagaagagtattagagtccaaaaagggctctgagctattgactgctcataattctaaactttatttattaaacaagtttaaaaattaaaaaatacaacctcttcaatatgatagggctgagaggacagctaatcttatcttccagcattctgtgaaatgtctggtatccccataagtgtagaaaccatgtttgtctggattaacctctggtactgtactggtggatcctagtacagaatcatgcatactaagcacttatcaaacatattttaatgatgctttgattaaataaatgcgcattttacatggaatatctgtactaaacacctggtaaagagtgagtatggttcagcagagatgaatgctatatcttaatgtgtttctgacttcagatcattcctaaaaagggagacggaagtaccttctgtgacctaagaacacaggctgtgtgcagtaacctgaagaaccaaaacaaagtaaggagaaacatatcatgacagaggtaactgaaataaaaattagtatgtgtggataaatttcacaatatcagtgatttaatggagtatcactttggcttcagctacttatttaaagtcagcgttatgtaatatctctaggctatattttaataggctgttcctccacacatttttgacatttataataatcatgttgttttgcatgaactttccacactgaaagctgaatgtaataatgaatagacagcttagaaagaatctcagtaataaaggcagtcaactggaaagcaagaaaactttttttggagttggggtatggacacgaatacctggagccttcctggtgactctggttcctgggaactcatcctgcttgccatatgaaatgctactcagctggcccaatgtaaatgttaagttgctttcacttttaacaaattgttagcttctaatctacacagtctctttgcatcatatccataatacctcatcagaccattgagcacagtgtgtgcttgtacacagtccagtaacaattggcttctgattgcatatggagcgctgctacaatgcattcactaacattatattgtgctggtctcctatggagtaatgttcaaaatatctgatcttgtttttctccttccatgaggttgattttggtttgcagtactatatgagctttttaaaaaagataactaggccaaattattttttatagtaaatgactgtcactttatgcttaaacaattctactgatcttcttgatatttaaactaaattatctgaaggaagaatatcctaatctaagtcaaatagtatttctttggtagatatcaagttttaaaaaaatcacaaaacgatgctgaattaatgatgcttcaaaaataggggaaaaaaatcaccattctaaccatcgacatggactgcctcctggaacattttagagctgttctttctttaaatatcatgcattattcatactaactctaaaccacaacccccctccctgtaagtttaataccagttgctttatttgtactaaaacatttttcatgtcaaacatattttaaaaaaatcaaactctaaaagaattccctggggcactccttttttcatagctgtcatgcttctgtgctatgaaatagcttttttttttttttttacagcttttggcttgccagttaatttattactatctctaccacaccctatagtactttccagctcacctgctggctacaaacagctttctttccactgctgacaggcatattttaaaaacatttttaacttttatccttctttgaatctgtatacctgaatataatctttagaaagctatttctccataacatatcattgtttcaacattaaaagtaaaaatgaatacattagagcaacagagtatataacagagaatgattagaagaaagagaacaaggacaaggcaggaggggtagaagatgagggagaagaagagggagattacaagtagaaaagaaaaatttaagagggagagggatttaagggtattgtgaagtttagttttttaataacaaagttgcatgtttcccttatgctgctctaattttctgtgtaagtcaatcaagaaaaagttctcagtgcctgacttggcaaggaatcagtcaacatgttgtagcaatttttttcaaatttgtctctggatttgaaatgctttcatgaggacccattcttttaaaatttgtacatggaaggtgaagcttgttgaaacaggttggctttatgcactactgtaatctggcccttgctacctctagtgtaagaagacaactttcaaaaaccaatttgagaaataatgtccattctgtaaatccattttccagctttctacatatttcaactgacagtttttatcataagagtacaaaacaaagacaaagtaggatttaaaacttatggaaaatttgcttgacattagtttcacttgtcagaataggcagcattcctttggaatcaaaacagcaagagtccctaaatgagagaaaataaattcttaaattttcatagaaactgacatgaagcagaaaattagtaaaacttaacggcaggagaaggggagcttgtactaagaacctacaacccattagattcaggctacctcctgcaataatgcttttaatttgaataattcagatataaagtctaccttttaaaaaaaaaaaaagccaaaaatcccatgggtaaaagtctgtcaatttactttcattcttcagaaagacaaaggactgggatagttgcagtatcctgagatagtaacttcagatgttaacacattgaagaaataatttagaaagtttggaaggagtagagagagaaaaaaaataaaacagaactagaagacgggacaaaagattcttcagtcgcatacctcatttcccagcctccataacagaagaaaaatatgttacacatccctaactaactcaaaaattattgtgtgccagcatcataaaatgataataagttgccaaacaactatagagcccacctttatgagctatagccattcttgttacaatatgaacatatttgaatcacaaccactgatgcaaacttgaacataccacttagcatggatcttgcctggatgcacgcatttggtacagcaaaatattacaattcctctacactctgagggaatgccataagtctgaatttgtctttatgcgaaaccacactgtagtaaatgttagcaggtaataggtgacacaaaagcttcaatttgtcctgaggacaaatgaaaaataaaattagcaaggattataatatatattgttgagatcactatgttgttatttctcctgctaaatttctccctttctattcgtcaaagaatagatcaatgatgaaaagagtcttgacctcagaatttcttctaagatcatctgcagtgttttttctacctttaagaaagctaagaatcaaggctcaaccttactttcttcacttatttcacagctgcatccaaacccttgaccaatcatccgaaaatctgtggaatttgtcacaatggcaattaaataagtgagtgtgaatgaactcacataaattcatccccattacataaaattgatttaaaaaatcctcagtttcatactagggatgcagggatggcttaacatatggaaatcaatacacatgatacaccacataaacagaattaaaaataaaactcacatgatcatctcaatatatgcagaaaaagcatttaacaaaatcccaacatccctttgtgattaaaaccctcagcaaaattagcatagaagggacataccttaaagcaataaaagccatctacaacaaacccacagcgaacattatagtgaatgagaaagagttgaaagcattctccctaaaagctggaacaagacaaggatacccactttaaccacttctattcaacatagtactggaagtcctagcaagagcaatgagacaacagacagaaaataggggcatccaaatcggtaaaaaggaagtcaaagtgtcgctgtttgctcatgatatgattgtatacctagaaagtcctaaagactaatccaaaaagctcctagaactggtaaatgaattcagcaaagtttcaggatacaaaattaatgtacacaacgtagtggctctgctatacaccaacagtgaccaagctgagaatcaaatcaagaactcaacccctttcacaatagctgcaataaaataaaatacttaggaatatacctaactaaagatgtgaaagacctctacaagaaaactacaaaacactgctgaaagaaatcatagattatataaacaaatggaaacacatcccatgctcatggttgggtaggatcaatattttaaaaatgactatactgccaaaagcaatctacaaattcaatgtgattcccataaaaataccactataattcttcaaggaactagtaaaaagaatcctaaaatatatatgaaaccaaaatgagcctgcatagccaaagacagactaagcaaaaagaataaatctggaggcaccacattacctgactgcaaactatactataaggccatagtcaccaaaacagcatggtactggtatgaaaataggcacatagaccaatagaacagaatagagaacccagaaataaagccaaatacttccagccaactgatcttcaacaaagcagacaaaaacataaaatggggaaagacaccctattcaacaaatgatgctggaataattggcaagccacacgtagaatgaatctggatcctcatctctcaccttgtaaaaaacttcagctcaagatggatcaaagacttaaatctaagacctgaaaccataaagattctagaagataacattggaaaaaacccttctagacattggcttaggcaaagaattcatcaccaagaacccaaaagcaaatgcaacaaaagcaaagataaatagatgggacttaattaaactaaaaagcttctgcacaacaaaagaaataatcagcagagttaacagacaacccacagagtgggagagaatcttcgcaatctatacatccaacaaagaactaatatccagaatctacaaagaactcaaatcgcaagaaaaaaaacaaacaatcccattaaaaagtgggcaaaggacatgaatagacaattttcaaaggaagatacacaaatggccaatgatcatataaaaaaaagctcaacatcactaattgtcagggaagtgcaaatcaaaaccacaaggcaataccacctcactcctgcaagaatggtcataataaaaaaaaaataaataatgatactggcgtggatgtggtgaaaagggaacacttttacactgttgggaatgtaaactagtacaaacactatgaaaaagagtatgaagagtccttaaagaactaaaagtagacctactgtttgatccagcaatcccactactaggtatctacccagaggaaaagaagtcactacatgaaaaagatacttgcacatgcatgtttacagcagcacaatttgcagttgcaaaaatatggaaacagcccaaatgctcatcaatctacgcatggataaagaaaatgtggtatatatatatatacaccatggaatactactcagccataaaagggaatgaaataatggcattcacagcaacctggttggaattggagattattattctaagtgaagtaactcagaaatggaaaaccaagcatcgtattctcactcacatgtgagagttcagctatgaggaatgcaaaggcataagaatgacacattgaactttggggattgggggaaaggttgggggatagcgaggtataaaagactacatattgggtacagtgtacactgcttgggtgatgggtgcaccaaaatctcagaaatcaccactattgacattcaaaaaataaaacaaataaaaattaaaaattaaaaaataaactctcaaagttcatgccttcatgatagctcatcaatgatatagcctccatctacagaggagaacacagttaagattatagacctttaaaaaactaggttagtttacacagctgaacatattttcttcctggaccccaacaccgatttaaaaattagggtgctaatctgaagaacctcagaaatgctttgattctgagtagatatatttaaataatcaactattacaatagcagttcatatctctgctttgaaatactctggaagagacagaaatgagtggctttacaagatgtcatttgcataacaccacatgtaaaaattacattttattcactgagaaaaggtcagattttcttaagatcacacatacttagaccaaggccccaagagtatgaagtgtcaaatcagagaacttcagtctgaattctatctccgctatttcaagatgtggaactcttggaaaagttaacttttttgagtatcagtttcttattttcttttaataaagcagagatgataccatttattaccacttatatctaagagttattatgaaaattaaatgagattacacacatacacacacacacacatacacaggttgggggttattaaatgagattacacacatacacacacacacacatacacaggttgggggttatcttggaaaacaaatggtgctcaataaatgctaactaaaacaaagaaattaaaaagaagccctgaataattatgcagtcataacaattgtacattaaccaattcaacacctaggagaaatggacaaattccttaaaacatgaatattacccaactcaagaagaaatagaaaacctcaacagacccataacaagtaaagacaatgaatcaatgatcaaagacctcccagtaaggaaaagctctggcctagatggctttaccaacggattctgccaaatgtttaaagaagaattaataccaatccttttcaaactcttacaaaaaaaaaatgaaggggagggagtacttctaattcattttataaggctaacattatcttgataccaaaaccagataaagatatcacaggaaaagaaagctacagtccactatcccatataaatatagatataaaaatcttcaacaaaatattagcaaaacaaatccaatggcaaattaaaagaattacttaccagggcaaagtggaatttatcccaagaatgcaagggatcaaatcagtgtcaagcattacattaatagaacaaagggaaaaaaaaaccaacatgatcatctcaattgacacagaataggcatctgacaaaagtctaatattattccatcataaaaaattctcagaaaactagtaatagaggaaaaagacctcggcatgatgaaacctatttataaaaagcctacagctggccaagtgtggtggcacgtgcctatagtcccagctacttgggaggctgaggtagaaagattgcttgaagccaggagttcaaggccacagtgaactatgatcatacctcttaattctagcctggacaacagagctagaccctgtttgttaaacaaacaaacaaacatccacagctaacttcatattcaatggtgaaagactgaaagctttccccttaagatcgagaacaagacaataatgttcactttcactgctgctattcagtcttgtagtggaagtgctagccactgctattagacaagaaaaagaaataaaatgtatcaaattggtaagggagaggtaaaactatttgtatttgcaaatgacataatcctatatatagaaaatcccaaagagtccctgagaaagctactagaattaataaattcagcaaagttgcagagtataagcttaacacgcaagtatcagctgtgtttctaaacatcagcaacgaacaacccaaaagaaaattaagaaaacaatttcatttacgaaagtattaaaaagaactaaacacttagggataaatctaaccaaggagatgaaagacttgtatgttgaaaactataaaacgtttttgaaagaaattaaagatgacataaataaatggaaaagcatctgtgctcatgggtaggaagatttaacactgttaagatggcaatactacccaaagcaacctgcagagtcaaagcaatccctatcaaaattacaacaacctatttcacagaaatggaaaagccaattcacaaattaatatggaattacaagaggtcccaataactaaaacaatcttgaaaaagacgaataaagttggaaagctcatagttcaaattttaacacaaagctacagcaattaaaacaggatggtactggcataaggagacatatatatatatatacatatgtgtgtgtgtatatatatatacatatctaccaattaaatataatagaaagctcaaaattaaaacctttacatatatagttgattgatttttgacaaaggtgcaaaaaccattgaatgggggaagggatagtcttatcaacaaatgttgtggggaaaactggacatccatgtgcaaaagatgtaaaacaatagaaaaaggttttaccttacacagtatacaaaaatcaactcaaatggatcaaagacataaacttagaagctaaaaaaactaaacccttagaagaaaacatagtggtaaatctttatgacattggatttggcaatgatttcattgatataacatcaaaagcacaggcaccaaaggaaaaaatggataaattggactccatcaaaattaagaactttagtgtataaaaagatactatgaagaatgctaaaagacaaattacagaatgggagaaaatatttgtaaatgatatatctgataaggtattaatatccacaatacacaaataactgaaactcaacaacaacaaaagcccaactcaaaaatgggaaaactacttgaatagacagttctccacaggagatatccaaatggccaatgaggacatgaaaagatgatcagcatcataaatcattaaggaaatgtaaatcaaaatcacagcgagataccacttcacacctactgggatgataataataaaaaaatttagttgaaaataacaagtgttagcaacaatgtgaagaaattggaaccctcttacatttctcgtgggaatataaaatggcacggctactgtggaaaacagtttggtggtttctcaaaagtttaaacatagaacttcatataatccattaattcaactcacaggtatatatccaaaaggattgaaagtggggactctaacaaacatttctataaccatattcacagaagtattattcataatagccaaaaggtagaaacaaactaagtgcctatcaacagatgaacagataaacaaaatgtgatctgtatacatatatatgtatatatatgtatatatatatacatatatatacatatatatacacaattgaatattattcagcaataaaattatattttaatgtatgctacaatatggatggaccttgaaatgttatgcttaccaaaataagctagacatagaaggataaatattgtattattccaattatatgaagtacctacaataagcaaatgcatagagaaaaataatagaatagaggttaccagagactaagggtagagggatagagagagttattatttaatggctacagcatttttgttgggtatgatgaaaaagttttgggtatggattgtggtgttggttatacaatattgaaaatatattaacgccactgagttatatacttacaaatggctaaaacaataactattatattatgtatattttactgcaataaaaaagaaacattaggtatacttgtaaaattgtttttggtcgttgagcagagggacactatgactcagtctaacactcagcttttgggccgcatttccaatggataaggatgtagtttaacaggctaaagttactcagtttcaccgtcagactttactcccaatcttagtgctttatcattttcagagaacttttagatattttacaaaatttaattttcacgtccacgttgggtagtgaacaaatcgtgacacatttcttagatgacaaaaagtgaggttcagcaagattaaatgacatgttcaagtaaggatgaaataaaatagtccatgtgaaatatgtagcacagtatttggcacagtatcaatcagtaagctttagctattattattatcatatattatcatatcataactagtgagtaaatggaagacccaggaacaggcagacatcctgttcctaggaccttctaggaaacttcaagtgtgctttctagccgcaatcatgtaaaaaattccaactacataaagcaatgggtcagctaaatcaagcctgaagtatgaagggggctactcatcgtttctgtttttcaggcaagctgatcttgattggatatacacattggcaactgtgaaagatgctttatcttttaattttctccaatatttgtgctcaaatgtatctatcttactcttgattggtgcacctctctgtatcacaatgtgaaagagcaaagcaaccaaaagtctgtggtttatgttctgggatctgatgatgagttcctatcaagaaatatgtctctaattatagaacctgtaaaacatttttaaaaatagggattaaaactcaataaagctatttctagagagaacaatctgaaagatgctgtcctggagctgaacaatccctgtgggcagcatgccccctcagcaacccactgaggtgggagagcttgcctagtgtttactacacgctgggactctgaaatgcccagaggcacaggtcaaatcatagggtggggagtgaaggcctataaccctaaatgtatttgcttacactgtcttaacatggattcagaaacagtcaactttaacaaacaatgaatgtcaccccaaggtagtccttgctctctggaaattaagataattattcaatcagctgaaggcacaaataccatgaaatcatttcagatacgggaaagtggaaagggaaaaaaaaaggaaatttatttttttcaatttataaagaccaaggtagcacttgttcatcttgttgtttagggaaccagaatacaaatttatgccaccaattcaaggttttctttcaaaaatttagtcattgctgtctcacatacatttcttttcttttttattttattttattttatttcattttgtttttgagacagggtctcactctgctgctaagactggagtgcagtggcagaatcacggctcactgctgcctcaacctaccgggctcaagcaatcttcccacctcagcctcctgggtagctaggactacaggtgaacaccaccatgctttgctaactttttaatctttttagagacaagggctcactatgttgtccaggctggtcttgaactcctgggcttgagtgatcctcccacccctcagcctcccaacgtgctgggattacaggcatgagccaccacacccagccctcacatacatttcaagtgaagttaccatagctcagtttggggcaaaaagaagttgtattgtacttgtccagtttccagtccaatagaagtctcttcacctaattcatgtgaatgataaaaacactgcatagattgattaagtcttctgaggatgtaatttctctactaatagcgtaagaacatataattttaatgaattttaaacacatttttcatatacaataaagcctaggttagccaaaatattgaaagaattagagttctgattaatgaaattgtctgacataatttaggagtcacacgaaagtaaacacttttttttaccaaccttgcttgtaattaaaactcttcctacatctcaaaacccattgtcctgccttatccaacacagtttggccaacataatcaaatacagctctgttaccccaggacactaactttaagctgccctttgttcaatagaagtaactaatttctgcacaatattgtcccaatttctctgtttttctcagttacatattataatctcattaatgctgttagagaagacatttgaaaaatggtctaaaatcactaataaaacaatatcttcccccatgaaaagtggcggtattgtttcaacaaaattaggtaagcaagatgtctacgtctaacagaaaataagacccataactgattttgaaatgtggataaatttaactttaaaaacactgaagtcaaatagataatttccacatacagttcatttaaaatgtttctgggactggtacaggggtgtcaaactcaaattcagaatagaacagtaaacttggcttacttcaatgttccaaagaaagtcaaaatgaagaagtagtttagaatgacttacagagatcacaggaagactgaaccacttcactaaaaaaaaaaaaaaattctctgaaaaaatatactcctgtccttaatatagatgccaatgtcatagtagctaagtataccttgttctaaaaatcatgctctagaaaaatgaatttttaacaatttgaatgacataattttctctcaggtatccaaaaaccttttggtaatatgagtttgattcatttatatgtgaggaattttcagacagcccttaaactcaccaatctcataacatctcaattccttgaatcattcgtgttttgccacagacatcctaccttttcttacaaagaaggaagttctctatcaaatacaaaagagtaatcactggcaacaagcaattaaaacagatgctaaaatgcactaggcttgtttttatgctatttaataagctttcttctccagaattttagtaaagtgatttatattttattattgctctaagcatattaaaacgcctttgttcactttataaaccacatacacaaagaaactgctgcacgcagatttgttgtactcagatttgatggtaaatataatcaggttaatatgttaaaaagaacttgacacagaaattattaatgagtagaacaaggtcactacttctgagctgaggtcacttacaaagaatgcacaaatgaaattaaggttgacttttatttacttgactatcttcttacattggattcctttggcaacatatctttaaacatttaaagccctgtttacaaggaggctctgaaagaagcttcaaaccattatgcccctaattgaattccccaggagtccagtaaactccgaggaaaaaagaaaaatcacaacatttgctaaatcatcttaaaacatatttcactgcaaggttacatgacctgttttttgaggtttaaaaatgaattaaaaagtactgaatacttcatttttttagatgaaaatcaaaaacaattttaccattagtggtaagctaattaaatcagtctagttttaactatctttctaagagaagtctgacaacaaacaatgacattttatactgaatgtgatcacttttccagaatataacagctctcaccaggagaaaaggatctttaaccaaaaaacaattattcacagtaaaagtatgagagagagctgacaaaaacattgtagtccccagggaaagtagtatcttatctgtgaattcaagacaaactcaagtggaagaagagaaagtaaaagtttttagcaaccaattagtttattacaatgcccactcttcccaattctaattttactttaaaataagcttttatgatatttttattcatagttccctggcatgctcctgtgtttgttgtgagtactaagcataaacatgcagatctgagcatttggaaaagaatgttaaatccctctctacttacctggtttgtatgttattccaggggggaagaggaatccctgttgggcagcagcagctgctgccagagtccgctggtcatgtggaaaaattgggatcatgagcggaggcatgtgaccctgaacctgctaaacagaagagagcctatgatcagacagggagcaaatgtatgccaagaagaatttgtttttcactcctggtggtgtgctggtacccacacagccacccacctctaacctcattccaaatctgcaatctgagaaaattcagttaaaatccaccaaatcccttttctgagatgctaatagcataccgaagacgtaacttcattgtgcatttgcctcgtccctgcttccaccgaactgtagttaatggttttcttttctcttgacttttttccttttattttttcttttaaacaaagaactagaagaaataagtttgcttcctttctagcactgtacaatgttgagaggttttgccctttcacctgctttgcattctgtgctttctttcaaaaacagtatttagtatccatggtcagaaaataatgtctaattaatatatattctaaaagctgtatctccccagtttaggtatcttatttcaaagcctcatgcattatgttaaacatatagctcttcagatttaaggctactacatcttggctcccaattaaagtaatactctttgccatacacacctcgatgtaacatataaattgcttgtctggctaagcagttttacagctttatgcactaccatgtagctcagtaattatggagttgttttcagagaacatttcataataaatcctactatatcaaatttcatttgacctcaataaatgtatcaaagagcacaaaaaatgcaaaatagaaaaatctttactctatatcagtatttgtattccatataaagaaaataagagctatgacagaatcatgcttgtgaaaattacattttaatttcctagcttccttctttactctatgcatgctgcccggattccaggatagcatgacaggaaggttttgtcctggctttcagggcacagttttataggttgaatacaggacttttcttatttaaagatgaaaactaagatataccaaaagaaattatctttaagttcaaacagggtatttagccttttcactggtataaaagggctatattatatcttttttaagatacaaacctttaccagtaattcttccaaccccaaacccttccctgtctaaattcctaaatcttctctttaggcaaaattccatacactggctaatgaccctgtttaattagcactgacttgccttgtcctgtccctgttcccttcatagccagggacacagtgcaaaaaatgcttctgtgtaggtctaagaggtttcgtttaccaacagtttttctctagggaaagccctaagatgtgggttaataaagggcaagcaaaaaataaacactttacaggatttttctgaattcatttctcaagaaaatcaacttataataaaaaggtctttgtgcaattactaccttgccagtggggcatgaaagaaactagctttgagcagctatttcttccattttagctgaggtaagcccaagtttcgtacattagagtacaaactaagcctgcttaaattggagctgatcccccagtgcccaggtcttgcctttaaccctgaagaaaagcaccgggtttgctgttgaactctagcttgttgtaccctgatgcaaacctgagacatcagagacgagggcactattctatgccagaaaataaaacacaatatttttatgggttacaattgttcagtgcaagagtacatcaaaggaaataatttcatttgcctccagaaatatggccctaatatgtacctaaaatatagcacagatggcttatactctaaaaagggagaaaaagaaagtgaggagtttggatattatatttatttattatttctttcatttcacaaacatttattatgttgttattactgagaagtagctgaagatgtttgaatatttagcttgagagataaaagaggtaaggttatcttcaaatatttgaaataataatgtatggaagaaggattggattaagactgaatggttaacagagggcagaactaggctcaaaagaagaaatttcatggaaatgaaatgcaaagaagaactttctagtaataaactattctatagtcactctgagtaaagagatggtatatatcctttccctagagctggtccagtaaagaaaggctgtataacaccatatgttagagatgtttaaagcaaatacgtaatgaaaaacctgattatataataacctttagagcctttccaactttataattctatgattgtttaaaagtcaacattaatacgatagtgtgattacagccattccttcattcatttatcatgcatttatttatcgaggatttactaggtgcctctaaaggccttgttggcaaaaagtctgaactcaaatctatatgctgctattttcttgactgtgtaatcttgaacagttacttaattgttctgagtctatttcttcatgtaaaaactgaagctaattataataccttacacaattattgtgaggaccaaatagacaataaaagtatctcttgtggcacagtacctgacataaaagtaatgcaatgtcacagtaaatccttgttagatccgtgttcctttcttatatggtttgcatattcaggactagaaattatcaaattactgataaaacaagcaataaaacaagcaatagttgatcttactcataactctactttaagaaagaaaacatgagccaactaaataattcagtttggcaggcagaggcttgtcatgcttagcagacaacatgcctcacagagcattatcccatcccaagtatctagaaaaccatgagaaagaagaggtgggaatacatgctcatttgaacatgtatttggggctctttggtgttatttatttagcagcatcttagaatgaaaacattatttttatattggtcgcccaagctcttcagatcatgagacaacagaaaaaggtcaatagcaattagaaaccagaattaattcttgaatctcagtgccttaaattacttcttttgtaactttccatcttcatgagataactaaccaaactctcgggttcatttttaatgccaaagagctgtaggtgtttcatattaagataagctgtaagaatttaggtaaattcatttctgttcatcacactctgcaaagaaagctatgttagaaacttcaaatactaaatattagcccagaggctattcaataacttgagagaaaaagtaaataaggaggaggtcaaaggacattgtgaaagcaagagtaatgacagaaacatagagttggaatagaacttggaaatgacctaacctagtagttctcaaagtgtggtaccagaccagcagcatcagcaatatctgggaaccttttaaaaaagcaaattcttaaactctaccccatacctactgaatcagaaaactctggaattcagtccaactaattaaattttaggctaaaatttaatttaggacagtgatctcaaactttagtgtggatcacagtcattcacagggcttgttaaaacacagattgcttccttctctccccctgctccccgtcaagagtctttgaatcagtagatctgaggtaggggtctgacagtgtacatttctaaaaagttcccaggtgaagctggggctgctggtccaggggtcattctttgagaatcactaatctaatccaaagctcacaatttacacataggaaaacaggtggctagagaaggtaaaagatatgagcctaaggttacagtgtcatgacagtgctggatccagagtccagaacagctaatcaccctgtccagggctttttccattacatcagagggacttcagtgatagaaaagggagaaatcactggttgcactgttttggcaaagaaaacctggaagtctccagctgaaaataattttgtgtttcaaaagcatattgctggagtttggatactatgaatgctgttcaattttcaataaattccttccttcctttctatttttattttattttatacagaacacactgatctcagtatctaccatcattaattgtgtagtttgttacaatacattgattagcaatgatcattttgttccaagggttaaaattgacttaaacttattttaagtaaaacaataaacttattttaagtaaaatgatgtaaaaactccaagtgccctttattaaagagaagccagaatatccagtagctagttagactctagcctgagaaaaggtgattaaaagttcttcttatgtctaattacataagtaataatagtaatgatgatgataatgatgatgatgaccacagcagctaatattttttcttgttttctatatgtcaaacactggaaaagtgatttacatactctatctcatttaatcctcaaaaccctgtaaggtactaactactactatacttatttaatgagaaaaacaaaaccatgtgaggttaagtaacataaccaattaaaagttatagagtcaggactcaagtccagatatgtcagggtcaaagttcatacttttaatatcatattacattaagcatgaagtcatcctttgaaaaacagatctaagataaggaatatgattattggtgataataatataattgtaggtttgcatgtggttgtaataaagaatacagagagatcacatggatccttaatccagtttccccaaatgataacatcttgcaaaactacagtatgacaacacaaccagagtactgacattgatacaatccaacaatcttattcatagttacctagtgcaagggtctccaacccctgggctgtggaccagtaccaggttgtggcctgttaggaactggaccacatagcaggaggtaagcagcgggcaagcaagtattaccgcctgagctctgcctcctgtcagatcagctgtggcattagattctcataggagcaccaactctattgtgaactgtgtatgcgagggacctagccatgctccttatgagaatctaatgcttgatgatctgtggtggaaaagtttcatcctgaaaccatcccccctcccctacccagtccatgcaaaaactgtcttccataaaactggtacctggtgccaaaaaggttggggatggctgccctagtgtgttaaaggaattgtgtctttaaaacaagcaaaggcagctgggcgtggtggctcatgcctataatcccagcactttgggaggccaagccgggtggatcaagaggtcaagagattgagatcatcctggtcaacatggtgagacccctgtctgtctctactagaagtacaaaaattagctgggcatggtggggtgtgcctgtagtcccagctgctcgggaggctgaggcaggagaatcacttgaacccaggaggcagaggttgcagtgagccgagatcatgccaccgcactccagcctggcgacagagcgagactccatctcaaaaaacaaaacaaaacaaaaacaaacaaacaaacaaaaaacaagcaaaggcaacgagggtctatcaatatttctaaatgccatcttctacagaatgctcatcagtatgacccaatgcaagtgatattagcagaaagtataaattaaagcaacaacttttccctctcatagctttccatgtattatacttactaaaagattgtcggttgaatgtggaacagaaatggaaagcaagagcaaggtaaggggaaaagacaaggaaagaggcttggtggccacctaagaatcacacaaacatccaggatattttccttttatggaagttgtgtattaaagtcactgcactgagtgccagtgcttagggcagatgaagaattctgaagatacagaaaagccccatcccactatgaagaatgtaatactgccttttccctaccttcccatcatcccgttttcccatttggtgacatgccaggaaaggcagtcacattggaaacagcaacccccaaaaatattttactaagaataaaaaataatagaactcccctcactccatcaaagactgaccagtctccacatgtcttttccaagaagttatcaaaatttcaaatagcatcttttttttcttgaaagtgtaactttccctaaacacaaattcagagattctttaattatcctatagatgaagaagtaaaactgattttgctagcacaaagagcaaaactagatgtggccaaaatatatcgctgggcatgaaaactgtgttatttttattgctttgaaagtaagcactatctggctgggtatgtaatttgaatgactaccaagtaaccggaaaccccatcacgggtgaagcttagtgtatcatgaaaggaataaactaccccaaagcacaactgtccattaattctaaacttatacaatccctaaccaaagtgtttcccttttggagagggtggggaacatattcttgatcaaataggctacatgcccagaaattttaattgctagggtattcctcacatctttcagagaatcaagacagcagcagatgtgtgtgaaacacttaggttctgtctcttccaattcataaaacagcattgttgcatcaacacttatcccctttgttttctctgtgctaagttgttgatgatgccattttttgccatctgccccagagcttcattaaagatacatgaatgggctaactggcctgatatcttgtgaggaacaggtgctattgtttgtccccgaagacttgcagtaaagatatgactctgaatacttgagaaagagcatctgcagcaatcagtcagagagcaacttggcagagacctggctatgtgctaatatgcaaacagagtgacactcagggggctcattttctctttcatgaagattatttaactttttttagtaatgggaaataagtatttgtattgaaaatcatgtgcatattaatgtctattactgagttaaagacagtgcaaaaatgagggtttttaaatactttatctctagaaaataattccttatgtgatttaattgaagaaagcttcttaaactgttgaaagaaatgtttccaatgtgtgtataccatgacagagatggaggaaaagagagaaaatagagagttcagaaaaagtgatcttgggagagagagaaggtgggagagagaggtgcaagaagtgcagtcagaaacaggggatggggatcagttttcgaaatgaccatattcatttttgcaaagaatagctgactcatttgcataaagtattaccactgtaaaagctgcaccatctaaagcaaaagaaatgaagtccccagaaaacttaaaggaaaagccttcaaggtcagaaatgtgtcttcttattgccaaaaagtgcatggaaatccacagtacatggacttatagttaattctggaggttaggaggaaaaatatctcacttgacaggataaattcatgccttaacagaaacccttttagtctcaaacttttttgttaaaatctttccaaaattttaatactctgcttcgcccttccttagaaagtgtaatgcagtagtcaacatactgaacttctctttgttggccacagccttaagtactcaaagaagccttaaattctatgctgtgttctttgctgttcactaattcacaaatcataaatcatctctcagcaagtaagttgactgtcccaaatggcctgtgccatttatatttctatatatcctgttgctcttatcacaggcctaaaaacacagtaagtattttgtattaactgatcaatggctgagagccaaccaactaggacctcagatctggtcttctgaccaccaattttcatagggtagaattgttaatgcaactacaaaaagtactgagctgtaatcattctcattccagaagagaacttaaaactgacttttaaatacatcttgatataatcttgttctctcttcatttgtcttatttagcaaatctgtggctgctacagctaatgtaatatatcaaatcctgcttctagagaatctagctagcccaacaggagaatactagaatcctagcaagagcaaatttaggacacacattttctagagcatttgagaacagagtccattcttcccaggtgtattccaccatccaatggatatacattgtacaaacaatgtaactgcattcagaagaggatcaatctttgcttgcttctgtttgtttgtttgtttgttatttgttattggcaggttattctctctccccccacccctttctctctctctccttcccctctgtctctctcttccctccccctcctgctctctctcttctctctctctctctcactccccctcctgctctctctcttctctctctctctctcactcactcctctctctctctctctctgtctctcataacttctcctcttccctcttcctctttcctttctcaggtcccatcaagataagatacaaaacactttgccaccattgttaatatccatctctaatataatgtaatgtcttcccaggatttggcacactattcctagcactcttcaaaattctcattaaagggccaagtaaactccttaaaaagtagaacgaactcaagatgttatagtttaaaagcatccctttacaaactcaggattgggacttcaaagtcatatgttttagttaaaacattaataaagagctaacttcacatatatatatatatatatatacacacacttttctgcataaatatacttcaatgaaaagttggtttaaagcaaaagaaaaaaatagctccagaaagtgagttctcttttctaattttgattatttaacatgctaaacaaaatgcctaaattattcacagaataaacgaaaaagatttatcttgtcactagttttactatgtccttgcccaactaccaagagtaaaacacgcaaacaaagcagtttcatttgctgggttggtgctttaagataactatttaaaatctacttcacagtctagcactttccaactctcttccatagttacagaggaaagaaataatctttgtaagtaagaacacaatgactctatcaggtcaacggtacatgttttaaaaatcttcttcaggtatatattctgagagaaatgttaatagccctgaaagggccaatcctttcctttgtgttaacatctctttttatattctcagcatactctatatactgagcatactctcagcatactgtatgtactcactttatttgcattttttaaaatggacaaatatctcattaatctactaggatcatatgtagtcaaaagtaattactttatttcttattcatttgtacatgttctatttaatattgaattttcagagaaaagaacatggatttagcactaacataatcttaattcctagtatctcttacttatttgtccccttattccataaaatgaagagctcaatacttacacaaataaaaagttagtttaggcctattagactcatgagaaacatgctactccaaaagagaaggcagtgttgcttgtcttaattcaactcttcaacagccatttagtgagaacctatcactctatacctggttctgtgctgggcagtagaaatataaaagtgccttaaagacatctatagccttgttttttcaggtagtggtattaggtttgttctcacttacatattagtacaaattatccagttttcagcttactttggaataaggtcaacagagaaagttttgcttaaaaagaaaactaaagtatagcaaaaattccattaagtatctttctctactctatctatggtctacaccccagaaaaaaattgagagtatttttgaaaacataagtcagatttctttataaaatggatgataaatgttaattaaatgtgtttaaattatcttactatgttttaagaaactctcaccaggagggaaatagaatatcctggccataaagaaattaataaaacatgctatgcaaaagtaaaatgtatgattcatttggaattagatatctactaccttttcaatccatacaaatgcataatcttgtcaattaaatattattgttaaggtctagtagtatgttaaaatcactttaaagtgcaactaaggaaaattcatgtgtgtttattactccttaaggatctattagtgggtattttattcagattcgtgctgtaaaatctgcataaactcagcatattgttatccccatgtgtgcatttgtttggttaaggcagaacagcaaatctcaatttttgcaacttctggaaaagtcaagagaactaaaacagtcttaattttaataagatacaaacagttatcactacagaagtgaagagttgactattatgcaaatagtcacagttagtggtcaccaggccatcacagaagactgagctagtcaattactttagatatttccaaagactagtgaagatgaatgtttcctattccaccctgtcttatttccagagaagtatgaaacatattagagactaatgattgtcattcctaaatggaaaccccattaaatacacaatgatcaaagtgttttgccaagataaaaattatttttttcaaattttgtataaatgccatttaaatatggtaatatttgtgaataatatggcattcctttctttgtaacaaccaaattcagatataaaccgttcataaacttttgacccacaatgaaggcaatctggctttcacctctgaagtattttatgcaaccttattctgttagcaatgaccagagttccattattaaattcctcatccagaaatgcaggtttacatcttaaactataggccttgttaaaattatgcacaagtaacttaaaggcaaggactttctatctctcaagggctctgtaaaagactttgcacagagtaggggctcaacaaatatttgctatataaatgaattcaagaacttgtattctatgttatttaaaaactaagccataacaattctgatggttttttaatctgctgaatcaagtcaaagtccattcatcatttacagttcttcaatggaggcaatagtacaaatctagtccaaacatatttccttatagtgatcttttcttttggccctgctgtggtctaactttaaagttcaccagttggtaagaaaatataaaaattgactttattaatttcaagattttttaatggctgagtactcctagtacatgttgaaattcctctatagtatcatttagagatgcctctaagcttctttaatatttcatcatcatcaattataatccttactgatagaaatgataattctcacccaaagagccaagaatacagtttaccaaagtaataatatttttaaaaattgttatatcactgtgagctcattatgcaataatgaatgaatgtcagaaaagcatttaagcatcagctatcatggagagcagaagcagtttcatcacaagcaagaaggcctgagaaacatagtgtggcaactctaaccaggacgtaaataagatgtctaagctattgacagctggggctcagccatggcaaattgtccctccttggaagtatcagtgagagacagtacctgtacatgtgattggggggcagggagataaagtaaggcaatatttataaaaactagataccaaggaaaggcataaacaataactataatcccaagtcaagtagtcttcaggttttcaatctttatcacagtctcgtcattttagagtacaaagctaatgacatgcacagtaatgtcattttggagcataacctgcaacccctgacctccactcccagcatgtgcattacacacacacacatactcctacacctgctatctccctttaatgaacaaggtgacgctgaagatgactataaggataagctaacatgctgatttttaaaaagcaatttaattttatacttttatttagtgccattttcataataaataacttagatacaaaaaagagatgtcgctgttaaagaaggtaaggtccatactccctagcctaggctgcctctccacaagatgctcttaacatacccctgactcctctttgcctactacattgtaccatgatgtttctccatttgctttcaatagtttctaagtctttgttcttaccacattttcaccatatggaatgatctttcctctcttctttgccttcccaaacctgaccaatctttcaaggttcagcccaaattaaactcttccatgaaaattccccaaacataaatttccctctgtcaatatttgcactgcacatattgtgttgaattatttaatggttttcccatgtggatacattaattcatttattaaacaaatgtttcttttaagacctgacactattgtaggcattgggaatacagtagaagacaatattccctaccatcatttctaagagaagacagacaacatacaaaaatacatatatatatgtacatttgtatgtgtgtatgtacatgtgtgtatacacatatacacatgaacaaatacatacagatataataaatgtaagttgataataggagttttaaaggaaactagatagagtatgaagaatgaaaggcagaaagttggaggtagtaggtagaaggtacagaggactatcttggatagggatggccaaggaaagcgtctctgaagagataacatcacacagggttaaacgacctgaggaaatgttgcacagagctagaagagagaaaagcaactcaggcagagggcatgtgagtgcaaaggtcagagcagaatgagcatagagagtggtaggggaaaggctagaaagacaggtggagatcaggttatttagggccttgtagagcacagtaagaaaatcggaattgtattcttagtgtgatggaaagtcactgaagggttttaaaagggagtattaccatgagacctatttaagtttagaaagatcactctggttgccatgaggaaaactgactataatagggcaagaatgaacgcagagagacaagtttagaaaatacctcagtaggcccaaaatggggataatgggaccagtttagaaaacacctcagtagacccaaaatgggggtaatggtggcctatttccatcttatatatcctctccgctcaagtagaaggaaaacatcttgcaagtagaagcttagtatgctactaggatggtgcctccaaatatgtcaaagagtatctgattgattcattcattgattgactgactaaaatatgatctttctagtgattccatataagatagaagcacatcattttcaaatacttgtactcattaattcctataggggagaagagtctaggatattataatctatttggatactgatacattactgtgattcttttccccaaatgttatatcaaataacatttcaatgaaatttcaatgaaattttaggcatcagagcagcttactgacaaaaactaaaaatgtaaattcttagttcagtctctgtgtaggaagtataggaatatttaaaataattcaagttacctaacaaattttctatggaaaaaaataaactgttcataaagatcataaaagtacaaagatcgatatatacaaactggctcaaacactggttaaataaaacttgtctttttcagttagggggagttgagactaatgtcatctttgtgaaataaaatggggatttccaaggtatagtccagtactgcagtaattcacttctcatgatactcctgctgttacaaagaacaacaagccaataacattgtttaggactaataagcagcaacccaatacaatcaataactcagtgcaatcacagctgaaaaagaatacaaactcaagcccaaagagaagtggaaggatggtggttcactcaggtcaagagacagaaatactcagaattcaaaatgggaaatgtatacattgaaactttcacatgttcttaaagaaatcataggaaggaaggaaggaaggaaggaaggaaggaaggaaggaaggaaggaaggaaggaaggaaagtttatttgagtgaagttatttaactaattgccattattctctactctccaattctccaatagttacagtaataactgtatttttcctattggaaattaggatacaaggaaagaagaagtgtagaagcattcacatggttattacagaacatatatttaacattaggtctgttcctttctagaatattcagcacttgtagtcacaatacccatgatatgtgagtcacatggccaagcatcaatccacagatttaaatttttggctttgggtagcttatattacaacttgaactcccaagaatgtagttacagatctgtgaacaggcattttccatggccctagtataacatccacaatgatctaaaactgtgatgatcaaatctatagacttttttttagttccacatgacagttcccccaaatgaatgacacaaaatccagttttgattctctttgatttaacattttaaaaggctgggctagctcctttaatactgcactacaactgtagtttccacagtagaataaggagttgaatctacatagaaattatcagccaataacaataggtctttgtccagctgtgactacttccctgctctacaaccagtccttatctggctcaggaaatgcctgttttaactgacaggtaggagattaaatctacagctgctgaaacacaatctcagctctgttagataggctttcattgaaaagcactacaaacacataatttgtttatgttgtaccagcaatctctgacaaagcagactgtctagctgagacaaatgtggttaaacccatttattgtattatttctgctacacagaacaagctcttaaaacacagaaactagacaaggcacaaagctctaactgtctaaagaaatcaagaatagatgacttcttgttacactagccctttttatacagaaagcatgttctcccctggaaaacatctattccaatttctcttttaagtgagtggttcaattatgtttatgttttctgtttttaaagttcttttgttcctgccagcataaacaggcataaaatcacctaatcacggaatatctctagatttaagaacatgatgaatatttatagcaagtgctatatcaccccctcaaaaaatacccataatgataaattctgatgacaatccaacctctttcaatatttattgcaaattcttatcatgttatttgatttctttatttcacttgatgaaaaaatagctttgtaactcaaagaatatgaatagtagtttctttaaaattaagaagttatacatagaaatacctaattttataaaataaatattaatgggagagatttttaacaacaacaacgaaggctgctagtcaagtgatcatgaattacttgctccaagttaataatattaactagaaattgatttttgttgtttttgcactcaaaatctattcttcatgtatacttactcacctctagcattctgaatatactgtgtatacataactgtaaaattagtaatactgaaggttaaagtctttacctacatctattaaattctaaaaattatgctcaaatataacaaaagaacagatggtacacaatgtgatttaaaaataagaaaacagatgctataactcaaacttgtcaaaaatgttaggaagaatggtataataaacataaagattataaaactgtatttgaaacatggtcaaaatgattattgttagccactctcaaacatgtcattattccctaaaatcttattttatttttccttaatcatcatcataaaactggaaagtgagaaaataatattccaagttggaacatatatgccacttggaactctgagttagtcttaaaatatagaaagtgtgtaataaacaagctgaatccatggggtctccctcaaacagcatggataatgaggggaatccataacagacataaacaaacccagaaagatgtctagaccccacatcattatgtatgatatatgcccaaaatatatggacatacatttgaatgttcaagttcaaacttggcttctattagactgattcagtcacagcatgtggtttctttaataaacaaaccttactgttagaaaatattgggaactcaaatcatgtattatgtcccagctagttaaagatgtggtgctttaatgtcctatatcccttgaagctttctaacaacagactgcaaataacaaagaaaactacatcctagaaaagcatatagaagtcttagatttttgtattacaagttgagagcaaatactatacaaatctagcatttcaacatatgttcaagagaaaatatacatttcccattaaaaattagaactaggtttaacaatgtggactttggtttatatttttcataatgcttaagggtgctgaatacattcacataaaaatgtaatgattatttgtctcactacagtaagttctttgccatgtttgacatatacacatatgtataatattcatgtatttagctagctttagaatcacagacttttagaactgcaatagttttagaaagccaattttccaataccttaattttaaacataaatgccagataaatggcttataataaaagtaaggccaaaagagaagtgacttgccaaggtcacaaaacttaagaacgaccaaactaaagttggtctttagtatccagtttacttatctcacaaaatcagattttcagggacagaaatgatttagagactatgtaatctggtgactctaacctggaaagaagctctagtgagctttttctgaaatatatatatatgccttctccttccctgcccagaatacagcttaggcctaactactacatttgacagaggaaatacttgaggcacatagggatagtgtgacttgccgatggtgacataacctggtgactagatatgcgaattccaagttcaggaattttcatttttatttcccagttttctttatcttttttatttatttatttatttttagacagagtttcgctcttgttgcccaggcaggagtgcaatagcgcaatctcggctcaccgcaacctccacctcccagattcaagtgattctcctgtctcagcctcctgagtagctgggattataggcatgcaacgccatgcctggcattttttttttttttttttttttagtagagatggggtttctccatgttggtcaggctggtctcgaactcccgacctcaggtgatctgcccaccttggcctcccaaagtgctgggattacaggcatgagccaccccacctgtccatctttatctcttttttaaggtaaaacttaaatacaaacataccctctttctgtcctcaactttagcctaaatatgttttcttaaacataaacctacatcatgtaaagaggatgaaagcaaatctcacttctggcaaaattgatacaaaattttattttctgataattgcctctcttcctcttttttttcccacttcccatcacaactttatatgctgtgacatacattaaaatcttctattattcttttttaatgtgaaaatagtaacttctccactcatattcctcaaaatatacagagctttacaaagatagcttttaacaaaatataaattgaattattttcccaagggttaaggtactagttttaaaaagcatacaagtgagcagactaaatagaatgtaacagtatgtaaaaaggataagacatcatgaccaagtgaggtttattgtgggaacgcaaggttggtttcaactttgaaaatcaatcaatataattcatcataataagagaataaaggagcaaaaacataaggtcatttcaataggtgcagagtaacacttgaaaaaatttaacacttattcatgatttaaaaaaataactttcagcaaatttaaatagaaggaagcttcctcaatctgattaaaagtatatttgaaacacctacagctaatatcataatcaataatagtgaaaggatccttgctttctacctaagatcagacaaaataggcaataatgtctactctcaccacttctaatcaatattgtactggatttcctcatcagtccaataagcaaagggaaataaataaaatgcacacagtgtggaaagaagtgacatttattttatctgcaaaaaatataatcataatcatagaaaatcttaagaatttttttaaagtggccagaactaatagtaaattaagcagtcacaacataaaaggccaataacaaaaataaattggctttctatatactagtaataaacaattagaaaaaaattataactccatttacattagcataaaaataaaatagaaaattttaaccaaagtttataagacctctacactaaaagctatgaaacattataaggataatgtacaacatgaggactatagttaatattgtattgtacactgaaaatttgctaagagagtagagtgtaagtgttcttaccacccaaaaaaggtaactataaaaggtgatgggtaggttaatttgcttaactgtgttagtaatttcactatgtttatgcatatcaaaatagcatatcatacaccataaatatatacaattttttgaaaattacaaaggaaaattttgaaacactaaaataaatggagacatacaacattcatggaatgaaagactcaatagtgttaagacagcaagtctcctcaaactgatttatagattcaacacaactcaaatcaaaattccagcaggacattttgaatatagtatgaagctgattctaaatttgatatgaaaaaaaatagtcaaaacaattaaacaaataaaattagttaagtatagtaagatgtcaaaacttactataatgccatttaggtattaggatggtattggtttaaggatggacatataaatcagtggaccagaatacagagtccagaggtagatccacacctatttggtcaattgattttcataatgatgtcaagataattcagtgagaagatgataatctttaaaataggctttgctataaataggtatctgtaaaggaaaaagatgtctggactcttatcttatacacaaaatttaactcaaaatgcactaaaacctaaccataagacctaaaactgaaaaacgtctagaagaaaacataagagaaaatctttgtgacattgtattaggcaaacatttaaaaacagaacaaaagcgtaaaccagaacagaaaaaaaaaatggtagaatgggtgtcattaaaatcgtaaactttgctctttagaagacatggttaaaaagctaagccacaaagtaagagaaaatatctgccaaaaagaaaaaaaaataaaggacttgtattcagaataattaagaaaaactggtacaactcaataataagtcaaataaatttataaaactggaatcaaagagttgaatagacaattcacaaaagaaaatatatgagtggccaataagtatatgacaggatgctcaacatcacccatcacccaagaaatgaaaatcaaaaccacaacaagatacccctaaaatccactagaatggtaaaaatttaaaggattaataatgccaagtgttggtgaggatgcagaacaactagaactttcatacattgctggttggaattaaaaatgatatagccactttcttttacagaaatttcttaaagaaacacaatttccataaagccctacaattaatccactcttagctacacaagaaaaatgaaaacatatgtctgcatagacttgcaatagtactcctaaaagccaatagctgaaatcaactcaatgaccattaactggaggaaggctaaacaaattacagtaagtctattctatggaatactacttagcaatgtaaagtaacaaaatattgacatacccaataacatgaaaaatctaagaaatataagaataaatgaaatacatctaacagaaaagactatttattgtatgattcaatttatatgaagtcttagaaaaggcaaaaatatagtgatatcaatgaataggcccagggtttcaatgggggatgctaactgcagaggacacaaggaaactcttcgggactaaaagttacatatggctctatacaacttccagaattcatcaaacacttaaaatggatgaattattgtgtgtcatttatatatccataaagcaggaaaaaaattgtcctataaagcaggcattacttcattactttcccattttatatatgagatgactgtgattaaggaaaattatgtaatttacctaagactataccaagcaagtggcagagccagaattcaagcctatatctacagcctataatttccaaaattttacagctgcttctcaaaaaaaaagaaagaaagaaaggaaggaagaaagaaagaaagaaggaaggaaggaaggaaggaaggaaggaaggaaggaaggaaggaaggaaggaaggaaggaaggaaagaaaaaagaaagaaagaaagaaagaaagaaagaaagaaagaaagaaagaaagaaagaaagaaagaaaaaagaaagaaagaaagaaagaaagaaagaaagaaagaaagaaaaaagaaagaaagaaagaaagaaagaaagaaagaaagaaagaaagaaagaaagaaagaaagaaagcttatctttgtatctaggaagacattggcatgataaaggtttttctttctcttttgtgggtaaaggtgggtacttattaacatcatctttagaaaaagggaaattctactttagcgttaaacagaaaaggggttccattgggaagtctgggctcattctatatccctcttgagctatcgggttaccttttttttttttttttgttccatttacactaacttgtcacaatgacagccttgtcctacctgtttttagctttgaatgaaaagcaattttataccacaaggacacacaaaatccaccaagtactgcaaacctgagcagcctattccttcatctcacaagctgatctctcagaatggcataacactagcatacagatgaacaaagcaagagtaggcagatttcaatccttcttttatagttttatttcattgaacagtaaaaagtatattattcattcagagacagttgtgatatggtaaaataggccctggaataagagaattgatgttaaaagatctaactcagaccccagtaacataaaaaaaaatggcctaattttggttttcttattaaaagagggtattgcaaagagaaaatgatgtaaagtgcttagtacatagtggacattatccagtgaatttaaatgtaattatttcaaaatagttcagtgctctcctaaacaaatggggcacacccctttttggagagtgtttcagaatcatggtgtctgtggatatgtattcttcatgttctccttctctagagattcattatgccctgaaggaaagggtggccctaccccactgctacagttgcttttcaaggaatacattttggggtggtaggtgtatgtgacttgagaatcatcaaaccatgtttgtgagtgtaggtaggagaaaaaactctgaggaacagagctgggtctatgctatcctataaagattttccataagagcactgattagagaagaatctctcaagacaaaaataccaatattttcactaaaatatctaagggagggtaacaggaaaggttctgaattatcttatgaggcacaaaaataaaagggagagaccaaagacctaaggacagatactaatctaatttgagacttatgacattacaacattatcatattattatacaggttttgttttgttttgttttgttttgttttgttttgtttgttttgagacggagtctcgctctgttgcccaggctggagtgcaatggtgtgatcttggctcattgcaacctctgcctcccaggttcaagcgattctcctgcctcagcctcatgagtagctgggatgacaggcgccctccaccatgcccagctaatttttgcatttagtagagacagggtttcaccatgttggtcaggctggtcccgaactcctgacctcatgatctgcctgccttggactcccaaagtgctggaattacaggcgtgagccaccacgcccaactattatacagttttaagccactatggtaattacattggtgatgataataatgattatagtaataaaggctacactgatatagtattggcaatgtgccaggcacttttttaagtgctttacatgcattaacacatttaattctcaaaacatcttcatgaggtaaatactgttattttccccattttacagatgaggcacagaaaagcttaatagcttgcctcaagatcaggcagctattaaggggatggtccaggatttgaatccaggcagtctgcctccagaatcctacttttaaccattgttccatattgcctaatgatgctgagattttcaagactggggccctgggccacgttgtaggagtgagagtagtgaggaaaggggaaatgagagggaagtaaggaaagccttgaaaacttcttgaagaaggtgtgtatagtttgaattagtatgtacaggtatacctcatgttattgttctttgctttattgcacttcacaggtaatgtgtttttacaaattgaaggtttgtggcaaccctggtcaagcaagcctaccaatgtcatttttccaacagtatgtgctcactttgtttctttgtgttaccttttggtaattctcgcaatatttccaattctttcttattattatatctgttgtagtgatctgtgatcagtgatctttgttgttactattgtagttgttttgggacaccataaaccacaccagtgcaagagagtaaatattgcatgcgttcaggctgcaccactgaccagctgttcccctgtctctctccctttccttaggcttccctattccctgagacaacaatattgaaattaggccaattaataactctacaatggcctctaagtgttcaagtgaaaggaagagtcacacatctagaactttcaccactagagagaagaagtcaatgcctggcttcaacacttcaaaggacaggctgactctcttgggaggggctaatgcagctagtgactttaagttgaagccaatgctcatttaccattctgaaaatcctagggtccataagaattatcttaaatttaccttgcctgtgctctataagtggaagaacaaagcctggatgaaaacatatctgtttacagcatggtttactgaatatttaagcctactgttgagacctactgctcagaaaaaaaaagattcctttcaaaatattactgctcattaacaatgcagatcacccaagaactctgatggagatacacatggagattaatgttgttttcatgcctgctaacccaacactcattttgcagtccatggatcaaggaataatttcaactttcataacattacttcagaaatatatttcataaggctatagctttcatacataatgattcctcagacaaatctaggcaaaataaattgaaaaccttctggatttgccattctagatgacattaaaaacatctgtgattcttgggagatcaaaatatcaacatgaacaggaatttggaagttgattccaaccctcatgggatgattttgaggggttcaagacttcagcagagaaaatagttgcagatatggtggaaacagtaagagaactagaattagaagtggagcctgaagatgtgactgaattatttcagtcttataataaaaccttaatggatgtgaagttgcgccttataggtgagcaaagaagctgatttcttgagagataatctactgagtgaaaatggtatgaacattgttgaaataaccacacaaggtttagaatattacataaacttagttgataaagcatgtaaggctttgagaggattgaaagatgttctactgtgggtaaaacgttatcaaatagcattacatgctgcagagaaatctttcgtgaaagagtcaattgatgcagcactttcatggttgtcttatttttagaaactgctacagctacccaatctttaacaaccaccaccctgaccagccagcagccaagaccctccaccagtaaaaaagattatgacttgctgaaggctcaaatgatcattagcatttttttttgaggtagagacttgctgtgtcgcaaggctgcagtgcagtggcacaatctcagctcactgcaaccttcacctcccaggttcaagaaattcccctgcctcagcctcccaagtagctgggactacagttgcgcaccaacacgcccagctaatttttttgtattttagtagagacggggtttcaccatgttggccaggatggtctcgatctcctgacctcgtcatccacccgcctcggcctcccaagatcattagcattttttagcaatatagtatttttggattaaggtatgtacattgtgtgtgtgtggtttttttttttttttttttgacataatgcaattgcacacttaatagaccacagtatagtgtaacttttttttaagagacaaggtctcacttcgtcacccaggctggagttcagtggtggaatcatagctcactgccacctcaaactcctaggctcaaggtatcttcatgtctcaacctcccaagtagctgggaatataagcacatgcctaatttttgaaaatttttttgtagagatatggtcacacccaactaattttttaaaaaatttattgtagaaatatagtcttgccatcttgcccaggctgatctcaaactcctaggctcaagcaatcctcctgcctcagcctcctacagtgctggaattatcggtgtaagccaccaaacccagccaacataacttttatatgcattgggaaaccaaaaaattcatgcaactcattttattatgaaatccactttattgtggtggtctggaacagaacctgaaatgtccctgaggtatgcctacataagtatatagtctctccagaccataaaccaattttcatcaacatgtatttgtgattctggttttactttgcctgttgtaagaaaaatgaagcagagcattcagtatcatgttacaagtgatgagctttgtgctctgacttctacactgtctaagaaaaactcacaaatacttaaaataaataatatgtgccttggaagataaaaataatttttgtgttgcaacattaatctaatctgaactttctgtaacattaaagaattgtacaaagtgtttgtgtttatctaaagagcatgtgggggccgggagcagtggctcatgcctgtaatcctagcactttgggaggctgaggtggacagactggctgagctcaggagtttgaaatcaccctgggcaacatggtctctactaaaatacaaaaaattagctggacatggtggcatgcgcctgtagtctcagctactcgggatgctgaggcacaagaatcgcttgagcccaggaggcggaggttgcagtgagctgagatcacaccactgcactctagcctgggcaacagagtaagactctctctccaataaataaataaaataaaataaataaataaatagcatgtgggttgtaagagagtaagacacactgtataataaaaagtccattgtttagatgtcaaaagacgaggctgagataatggttcttctagtatcttacttttgagccagtaggtatcaattttctcatctatcaatgagataataatatttctactgcttaccttaaggaatcaaggtgaaaactatctaaaagatatggaaattatctgacaaaatgtctgatatggtttggctgtgtccccacccaaatctcatcctgaattgtagttcctataatccctacgtgccatgagagggaccaggtggagataattgaatgctgggggcagttccccccatcctgttctggtgatagtgagttagttctcaggagatctgatggttttataaggagcttcccccttcgctgggcactcattctctctcctgccaccctgtgaagatgtgccttctgccatgattgtaagtttcctaaggccttccccagccatgcaaaactgtgagtcaattaaaactcttttctttataaattacccagtctcaggtatgtcttcatagcagcatgagaagagactaatacaattacacactatgcaaatatatacatatttcttcacatttactatagatacctaccagtaaaccaggaatttttaaaatttggggctttgccatagttctacatatagaattgcttctaggaataaagaagcttaatgaattacatatttaatgtctacattccaaaaaataagtgctagatagttccatacttaactaatctatacaacaacactattcagtggggcatcattttgcccctttacagtctaaataaacagtgcctcataaaggttaagtctaaagagtttctaaaaagagccaggattcaaaaaatcaagtgattctgatgccttcacttttgttataactgtcccaatatatcctttatagcaataagatccaatccagaatcatgtgtcatcatgccttcttagtatcctccaatctgaaatactcagttcttccctgatctttataaccttaaaaatttttttgttgttgtttttatttttttattttttttattttattattattatactttaagttttagggtacatgtgcacaatgtgcaggtttattacatatgtatacatgtgccatgttggtgtgctgcacccattaactcgtcatttagcattaggtatatctcctaatgctatccctcccccctcctcccaccccacaacagtccccagagtgtgatgttccccttcctgtgtccatgtgttctcattgttcaattcccacctatgagtgagaacatgcggtgtttggttttttgtccttgcgatagtttgctgagaatgatggtttccagtttcatccttgtccctacaaaggacatgaactcatcattttttatggctgcatagtattacacggtgtatatgtgccacattttcttaatccagtctatcatttttggacatttgggttggttttggagatttcaagacagttattttgtagactgtacctaaacttttttcctaatgtttccttatgattagattcaggtaatacatttttgtcagacatatcaccagaagcgatgctgtgctcttctcaatatatcccatcaggtaatatacatcaatttatcccatcactgttaatgtcgcctgagtaatatagtatctaccaggttttttccactatcgtgttacactttttttctacattttcctaagtactgtgtggggagatactttgagactatgtgaatgtatcgttctttatccagctctcacccaatagttttagcatcccttcatgtttcttgtcagaattcattattactatgatggttgccacgtgactttctttctgtaatgtcttgtatatttattagttggcacattaaggaagagctttctcttctcttttattttttcatttattcataaatacatcaggtcagttcatgaatccatgttctattcaataggataaatccattattatcatttttgatgcctaaattgcaccatatatggacacaggttaccccttcaagctggatgctttatccttttgttatgctcttaaaattctttaagcacctcctcactttctggaataataaaatattccagacttatcttgtattttcccttccccagaccagattcagaagcacagtttttagaagccaagatctcggtgtgatgtgttgatattactattggagtgtattttgcttctaagctgcctcacagagctaagaaatatatttagatgtattatacatattcacacacatttatacttctctctatatagatatggacatatatatataaaaccacaaagtcactttgatacttctaattccaatataataccacagagtttattcttattttccttcatttcatatttgtaactcttttctaaaagtaaaaaacctggctcatatattatatatatatatatatatatacatataatatgacatacgggagataggaaaaataagtatatgtgtgtgtgtatatttatatgtgtatatgcacacacacatacatgcacacatacatacatatgtatatttattttctctctatctcttacatattaccaaccaatctcctcatcctcctgagccacttccccacttgacaaccttcatccaataggacccaactcttgttaagccaccactatgagaagccactttcctaataggatcttcaaaccccactgagctgccacccaactcaggagccttccacaattggtcctgcttaatggcatttcaactgaatgagaaagggaggaggaaaagtggaagaaaagccctaatatgttttatgttcctacttccttttaattagacactactgtttcctccctttcatttaactgggaggcagcattatattgtatagtagaaagatcacaagttttgaagccacagagacctaagtttgatacctggctccaactaattagatgataaccttagcttcctcacttgtcaaatggtgataaaatccatatcattgcatatttatgaatattaaagaaaatgaacataatgtggttcagtgtctggcagataagaccataaatcgtaactattgttaaattgttaaactttaaaggtaagcacaaaaataaaggcatgtacatgactaattaaacctaagtgttgaggactatgagggtaaaataccagcaaagacaacagaataattcacatttgcaatagatcttgacacccaggaacctagctattgggccttcagtgttatgttctgccatgaatagtggagaaatgtgtaagtaaagtggaaataatataacaaaaagtgggtttcttttcaatttaaggatgatcagaataggtgcataataaccagaataaaaaatatctcttagctgggcacagtggctcacactttgggaggccaaggcatgcagaccacaaatcagctgggtgtcatggcaggtgcctgtaatcccagctacatgggaagctgagacaggagaatcacttgaacctggtgggcaggagttgcagtgagccaagattgcactgctgcactctagcctaggcaagagcaagacttcacctcaaaaaaaaaaaaaaatctcttcatgctcatgctcagtatatatgagtggtgaaatagtaaaggtcatcctatggttccaagcagcatttggatttctccattagatttccatttaaaaacactatcatgaggatgtagtatttccaagcgaagaatggaagtgaaatgagattacaggtattcaggtatctgagtgcctaaaaaggcgatgagacaagttcccagccctgactgcttcatctttcccaataaaatattaatagaaccaacggcagttccaagatggccaaataggaacagctccagtgtacagctcccagcatgagcaacgcagaagacgggtgatttctgcatttccaactgaggtaccaggttcatctcactggggcttgtcggacagtgggtgcaggacactgggtgcagctcaccgagcgtgagccaaagcatggcaaggcatcacctcacccgaaaagcgcaaggggtcagggaattccctttcctagccaagggaagctatgacagacagcacctggaaaatcgggtcactcccaccattttccaatggtcttagcaaacggcacaccaggagattatattcggcgcctggctcagagggtcccacacccacggaacctcactaattgctagcacagcagtctgagatcaaactgcaagatggcagtgaggctgggggaggggtgcctgccattgctgagccttgagttggtaaacaaagtggccaggaagctcgaactgggaggagcccactgcaggtcaaggaggcctgcctgcctctgtagactccacctctggaggcagggcagagctgaacaaaaggcagcagaaacctctgcagacttaaatgtccctgtccgacagctttgaagagagtagtggttctcccagcatggagtttgagatctgacaatggacagactgcctcctcaagtggatccctgacccccgagtagcctaactgggaggcacccccagtaggggcagcctgacacctcacatggccaggcacccctctgagacaaagcttccagaggaacgatcaggcagcaacatttgctgttcagctatatttgttgttctgcagcctccactgctgatacccaggcaaatagggtctggagtggacctccagcaaactccaacagatctgcagctgagggtcctgactgttagaaggaaaactaacaaacagaaaggacatccacactaaaaccccatctgtacctcaccatcatcaaagaccaaaggtagataaaaccacaaagatgggggaaaaacagagcagaaaagctgaaaattctaaaaatcagagcacctctcctgctccaaaggaacacagctcctcaccagcaacagaacaaagctggacagagaatgactttgacgagttcagagaaaaaggcttcagatgatcaaacttctctgagctaaaggaggaaattcgaacccatcacaaagaagctaaaaaccttgaaaaaatattagacgaatggctaactagaataaccagtgtagagaagtccttaaatgacctgagggagctgaaaccatggcatgagaactacgtgacgaatgcccaagcttaagtagccaattcgatcaacgggaataaagggtatcagtgatggaagatcaaatgaatgaaatgaagggaaaagagaagtttagagaaaaaagaataaaaagaaatgaacaaagccaccaagaaatatgggactatgtgaaaagagcaaatctacgtctgattggtatacctgaaagtgatggggagaatggaaccaagttggaaaacactctgcaggatatcatccaggagaatatccccaacctagcaaggcaggccaacattcaaattcaggaaatacagagaacaccacaaagatactcctcgagaagagcaactccaagacacataattgtcagattcaccgaagttaaaatgaaggaaaaaatgttaagggcagccagagagaaaggtcgggttacccacaaagggaaacccatcagactaacagcggatctctcagcagaaactctacaagccagaatagagtgggggccaatattcaacattcttaaagaaaagaattttcaacccagaattccatatccagccaaactaagcttcataagtgaaggagaaataaaatcctttacagagaagcaaatgctgagagattttgtcaccaccaggcctgccctaaaagagctcctgaaggaagcactaaacatggaaaggaacaactggtaccagccactgcaaaaacatgccaaattgtaaagatcatcaaggctaggaagaaactgcatcaactaacgagcaaaataaccagctaacatcataatgacaggatcaaattcacacataagaatattaaccttaaatgtaaatgggctaaaagctccaattaaaagacacagattggcaaattggatatagagtcaagacccatcagcgtgctgtattcaggagacccatttcacgtgcagagacacacataggctcaaaataaagggatggaggaagatctaccaagcaaatggaaaacaaaaaaaggcaggggttgcaatcctagtctctgataaaacagactttaaaccaacaaagatcaaaagagacaaagaaggccattacataatggtaaagggaataattcaacacgaagagctaagtatcctaaatacatatgcacccaatacaggagcacccagattcataaagcaagtccttagagacctacaaagagacttagactcccacacaataataatgggaaactttaacaccccactgtcaacattagacagaccaatgagacagaaagttaacaaggatatccaggaattgaactcagctctgcaccaggcggacctaatagacatatacagaactctccaccccaaatcaacagaataatattcttctcagcaccacaccacacttattccacaattgaccacatagttggaagtaaagcactccgcagcaaatgtaaaagaacagaaattataataaactgtctctcagaccacagtgcaatcaaactagaactcaagattaagaaactcactcaaaaccactcaactacatggaaactgaacaacctgctcctgaatgactgctgggtacataaggaaatgaaggcagaaataaagatgttctttgaaaccaatgagaacaaagacacaacataccagaatctctgggacacatttaaagcagtgtgtagagggaaatttatagcactaaatgcccacaagagaaagcaggaaagatctaaaatggacaccctaacatcacaattaaatgtgttggaagcaagagcaaacacattcaaaagctagcagaaggcaagaaataactaagatcagagcagaactgaaagagatagagacacaaaagacccttcaaaaaatcaatgaatccagcagctggttttttgaaaagatcaacaaaattgatagaacgctagcaagactaataaagaagaaaagagagaagaatcaaatagacgcaataaaaaatgataaaggggatatcaccaccaatcccacagaaatacaaactaccatcagagaatattatcaacaactctatgcaaataaactagaaaatctagaagaaatggataaattcctcgacacatacaccctcccaagactaaacccagaagaagttgaatccctgaatagaccaataacaggctctgaaattgaggcaataattaatagcctaccaatcaaaaaaagtccaggaccagacggattcacagctgaattctaccagaggtacaaggaggagctggtaccattccttctgaaattattccaatcaatagaaaaagagggaatcctccctaactcattttatgaggccagcatcatcctgataccaaagcctggcagagacacaacaaaaaaagagaattttcgaccaatatccctgatgaacatcaatgcaaaaatcctcaataaaatactggcaaaccgaatccattagcacatcaaaaaccttatccaccatgatcaagtgggcttcacccctgggatgcaaggctggttcaacatgcgcaaatcaataaacggaatccagcatataaacagaaccaaagacaaaaaccacatgattatctcaatagatgcagaaaaggcctttgacaaaattcaacagcccttcatgctaaaaactctcaataaattaggtattgatgggacatatctcaaaataataagagctatttatgacaaacccacagccaatataatactgaatgggcaaaaactggaagcattccctttgaaaactggcacaagacagggatgccctctctcaccactcctattcaacacaatgttggaagttctggccagggcaatcaggcaggagaaagaaataaagggtattcaattaggaaaagaggaagtcaaattgtgtctgtttgtagatgacctgattgtatatttagaaaaccccatcgtctcagcccaaaatctccttaagctgataagcaacttcagcaaagtctcaggatacaaaatcaatgtacaaaaatcacaagcattctcatacaccaacaacagacaaacagagaaccaaatcatgagtgaactcccattcacaattgcttcaaagagaataaaatacctaggaatccaacttacaagggatgtgaaggacctcttcaaggagaactacaaattactgctcaacaaaataaaagaggacacaaacaaatggaagaacattccacgctcatgggtaggaagaatcaatatcgtgaaaatggccatactgtccaaggtaatttatagattcaatgccactcccatcaagctaccaatgcctttcttcacagaattggaaaaaactactttaaagttcatatggaaccaaaaaagagcccacattgccaagtcaatcctaagccaaaagaacaaagctggaggcatcacgctacctgacttcaaactatactacaaggctacagtaaccaaaacagcatggtaccactaccaaaacagagatatagaccaatggaacagaacagagccctcagaaataataccacacatctacaactatctgatctttgacaaacctgacaaaaacaagaaatggggaaaggattccctatttaataaatggtgctgggaaaactggctagccatatgtagaaagctgaaactggatcccttccttacaccttatacaaaaattaattcaaaatggatcaaagacttaaatgttagacctaaaaccataaaaaccctagaagaaaacctaggcaataccattcaggacataggcatgggcaaggacttcatggctaaaacaccaaaagcaatggcaacagaagtcaaaattgacaaatgggatctaattaaactaaagagcttctgcacagcaaaagaaactatcatcagagtgaacaggcaacctacagaatgggagaaaatttttgcaatctacttatctgacaaagggctaatatccagaatctacaaagaactcaaacaaatttacaagaaaaaaacaaacaaccccatcaaaaagtgggcaaaggatatgaacagacacttctcaaaagaagacttttatgcagccaacagacacatgaaaaaatgctcatcatcactggccatcagagaaatgcaaatcaaagccacagtgagataccatctcacaccagttagaacggtgatcattaaaaagtcaggaaacaacaggtgctagagaggatgtggagaaataggaaagcttttacactgttggtgggactgtaaactagttcgaccattgtggaagacagtgcggcgattcctcaaggatccagaactagaaataccatttgacccagccatcccattactgggtatatacccaaaggattataaatcatgctgctataaagacacatgcacacgtatgttcattgtggcactattcacaatagcaaagacttggaaccaacccaaatgtccaacaatcatagactggattaagaaaatgtggcacatatacagcatggaatactatgcagccataaaaaaggatgaattcatgtcctttgagggacatggatgaagctggaaactatcactctcagcaaactatcgcaaggacaacaaaccaaacactgcatgttctcactcataggtgggaattgaacaatgagaacacttggacacaggaaggggaacatcacacactggggcctgttgtggggtgggggaggagggaaggatagcattaggagatatacctaatgctaaatgacgagttaatgggtgcggcacaccaacatggcacatgtatacatatgtaacaaacctgcacgttgtgcacatgtaccctagaacttaaagtataataataaaaaaaaataaaagagtccataagaagttctttcacaaaatgtttccttaaagggaaaaggatggtggagtttgaaatagttaagcatagcactatcatttttgctttttatgtcacttccttccccatgtcctgcttaatcctttctccccaaatgcaaacttaaatgaacaccgaaatttcctttttattgtacttctcacatttcttatctcttcccatccacatggaataaaaataactttgtttacttcagcaccctgaagagcacagccagtttactactctgatgttccaggtcagatttaaatcttctagttactctcctcttcctaaattctgttattcagtgtgaaatttaaaacttactaatgactgtacaccagaaatacagcctggcatgaagatgtgaattaccatgaacctcttggtctttcacacacctttcaaaggagattaaccattgcttcataactactttgtcaaagcatctttttatacatacaccaaatgctagttaacaaactataaaaaacaagcgatctgtaataatttttatagccattgaaatgtagttgtgtaccattgcctgagcctgccttttagctgattaacaaatacagtgaatttaactttgtagattcttaacatttaaagacaacagtctaaggcaatttaaagtatattctgccaatcagttgttgagttagaccacccatagcctttttttattcttcattgtttgaataatatgggaggaaatttagtgtatactctcttcttcctgtattttccagttagattaagctgttgtcttcacaattgcctcccagctgctgtgacttgtgaaaacaacagaccctgctctgttgtctggagaaagccgggattgttatgagtaactttattgcaggcacatgagtgtgttaagactttaaaacacgctcaaatgtcatgtgcacacccaatgacgggcaagaataattatgaaaaaacaagaaatctatgtctatgaaaccgtgttggacaaaatgggccattcattgtgttcccctgggaatgcctggactctgcagtcagaaaacaaaaaaggcacttttttcctgccgtaggctgaatgcttagctttgccatctgagccctaagaaaacatgggcccctctactgctggcgcacccacgcacactaaaaaatattaatgcctctctctccttacttttttccaggcattccctcgtgtaggctgtagccaatataatgtcaacacaaagacaaaatagtttatctaacatcagtcccccacaatttccctcttgtcctcaattaattgcccttcccccaacattaagaagaaaaaaaaagataacctttactccagtggaaaacttgtttctggcacagattttaactgcagcaataatcccttctgtacttttacatagttttaccaaatactatgtaagcatactcatttgtctccacgttgtttcttcttccttcaagacttctgaaagtcattttgttggttaaagtttgtcagctccctctcaaaaatgccccttctcaaagttaactaccacgtgtccttcttgtcaatgtgtgcaagtatactacacaaatggaatgacaaatgaaactccaaatcatttcagcccaaacacattttttaatatacaaattacactgaaagttcaaggtttctaagctttattgcaattttcaagggcagttattttatgttaaaccataggtaagttatttgctgattttcctagagagatatattgcactttgacggcctactgtaggctctacagtaatttccttggcagctgaaccagcagaaaaaaaaatatgcaataaacagatttccaaaacagtaagcttttgcccaggatctttaatcttgacccttttcagtacattccaggaagaaaacacagggagaatatgtgcttcattataaagtagggaaataggagtctgataggtcattaaagaccataaattcctatttcatcttcctttccagagctcagttcattgcacttttattcccgtccagcaaccacagacttcagaacctgctagggacaaaactggaaaagggaaaacacttctttggttgttttttgaaaaattagctatagaatacttatgtcaattcctttgactagaataaggattttaaaactcatcaagtttaaatatgttcttcatctttagctaatgagcaagtgacttagaaaggcaacagctggagaagtgagatacaaattttgtctgacaataaaatgtggttatcttttatttagctaactggtgttaatgacccagtagcagccaatgccaaaaagaggcaattgtgggtacatgtacacataccagcagaaaccaggatcttttagtcaaccaactggttgttttgactacaccactcccaaagcaattgatttgactgaattaaacaattgggtttgaatctatgattaaattagggagtttggaagcattttagagattgagattatctagttacttaattctaggccagttcattcattctgtaacataagtatattgaggctagagatacggagacaaagataactcaagtagtgtcaaaatcagtgtgtggatgctgtcagagacataaaataacaatattgattacagaagtgagttagaggtggcattaattacataggtaaaaaaggttacatttctctaagttgggaagaactacttttataagtaaccactattcagaaggagacaaatcttccaggccaaaatgtaaacccagagttcttttcaaacattttagcacaaatagaaatggccctggacaagctagcagagcccacatgagactacttcacagaagccactttgggatgggacggtcatgaataacacttctacatctttctctcaaacatggagttgatttcaggaagttttcttgtccatgcagcctaaacaagatttcttccctcccctggatcctaaaacctataaacaaatgaaactcacactgaaggaatattgagcaaggagtctagaactagttctgtctctcgggctgaaagatgatgtacttacaacatagccagccatcagaccagccacagatttgttttaacaattcaacaacatcaccattcctcattcacccacttagcttaattttcctagcatcactttcactgctgaggttgtctctattaagccatttttttgcatcattaacttttaaccaggcatcgatagctttattgtttaaattgtgtatgactttatttaacgtcagcatttcttctagctcctgacaagaagtcacattctataactaattaaattgatccctgggaagcaaaagccactaaatgaaattattcgtacccaagtgtcaatatattaaatcaaagggctaatgagttgggtcactgcttcttttattgggaggctacagcagaataagactcatattatcctctattttctgctttaacaatcaattttatttaaaccaaaggcagccaattaatacttttggattttacagtaaataatacctcttttataacatacaaatgggaaatggaaaattttctttgacatatgcaatatatttttcacatttttttaatgacattgggtcacagaaacatctaagatgatttaaaaggtgttttgcaagcaaacgattttgagaagttctaggtttcaagtattagcattacgggtgtaaatcaggatgaaaatttgcctctcagagctgacaatagtgcgtaacgaaagtgattaagaaatgactgaatttgtcatgtcagcttttccgatcgctcttgcagctgctgagtaatactttgaattcactatttacatttggacactattaaaattcatcacctaatagttcataccattcactgtctttgacataacttagcttcttttgacacaatccctgcagacaccatttttctgttgctgttaatttcatcaacccaattcatccacagagaaaatttcatgtcaaattatttgttcctgtaaattttacattttgtttgggagagtttcaccccataatttattgcttcagtatttgggaaagaaaaaatcctcataaaatcagatatggaatctcttacatctgcaaaaacacaaacaatatggtctataaatcatgactatagtaaaattacattaaaaactatggcaagctgaaaaattcagttctataaaattaggcccagtggcagttatctcctgacagtgaggaaaccacctctaggaaacactgtactaaagtaaaacttaaaatgaaggtacaaagaacacatacataaccaactgcaactgctaaataacaaattcaagcaatgccttaattttggtatgagaactttattttgtatatctggcaattagtcaaaataacaacagttaaagacagccttgaaatactttgggttgaattaatattatttatgacataataagttgtctaaagtcaatttttgtctctaatacttaactttgttgatttaccaccaggatcaaatacatcatagggaacaccacagatgtttttgacaaaaacatgttctttcacccacacagtttgctttttcaaacattgaattagggtttctttctttgtagacacagtggttcttttttaaaacaaccttaaatagtcacttttatccatttatagatgtgtatgctttggaggtcaagcatatgctgttgtttctcaccacaaatgttttccttcattttcaatggtcaaaagtcacaggcgtgtttgaccccacccacagacagctctgttcagtatctggagaacccaaatctggctggagatcactgaaacccagatgctcacttcacaaacaaatataaaggtatcccaaaacagaccaatggaatttgacactggactatcaataagttacaaaaacaaaacaaaatacaaattactattttctctggaatgtatgtataattaaagccagagaacaccctttaccattaatacaggctactgatctgaactaccatgccaagatggtcttgataaacacattctgttatataatagtgactgaattaactaacagatattacatttccctctacttcctagcttcatgtttttagacacacacacagagagactcacatacattctcaaaaatagctttgatatctcaaagatatcagaaatgatatattagaattacttttttttttttttgagacagggtctcactctatcgcccaggcgattctcatgcctcagcctcccgagtagctgggattacaggtgtgtgccaccaagccctaattttttgtttgtttgtttgaaatggagtcttgttctgttgccaggcttgagtgcagtggcgctatctcggctcacagcaacctccacctcccaggttcaagagattctcctgcctcagcctccccagtagctgggactataggtgtgtgccatcacatctagctaatttttgaatttttagtagagacaaggtttcaccatgttggccagggtggtatctatctcttaaccttgtgatccacccacctcagcctcccaaagtgctgggattacaggcatgagccaccatgcccagacaattttttgtattttgtattttttagtagagatggggtttaccatgttggccaggctggtctcaaactcctaacctcaagtgatccacccatctcagcctccaaaagtgttgggattacaggcaggagtcactgcacctggcctagagttacttttttaaggaaaaaaagtcacagccttgggaaagggaaaaaatttgtgaactgatagttgtcccaaatttgtttggcgatatgtcatcctacaaagcagtattgcacagggatatgtagagtaagttttactaagcctatcaaaaacagggttaactacctctgataggactggttagacaaataaataaaagatctcttccagttacctcctaaaatacaataaaaacccataccactcactaagcacaatatgagcaactgaacacataagactgaaacccactggggtccaacagactcaacctatctctttgtgtctcagagtataattggcagtaatgaccatcgaactctggtctccctgcccaaaaccatgcttacaacttccagttgccacttctgccgaaatgcccacagaagtgaatagactagtgagacagatatgtgatctcaaactcaagttttccagcttacacactattgataaaatactgaggaaaatctaagcatttttaaaagtcaaaaataaaaaaaaaatccaaattgagatataatgaagtttaacttcttttctctggagagtaccacacaatcttattaattaatcctaaaccaagcataattctaagttctacttttctgaaaacaaaacccatggctttgggtaatgctgcctgataataaaaaggaatataaaagtgaagtaagatggcaatttattcctcccagctcaaatcacattcctgtcttcattacagtggctggataccaccaaaagctttattacctgtttcctatgttttgacgttggacaaatgcaagtcatagcaaagatagcctgaggccaacaatgaagataccttacatatcttaatattatcaaggaactatgccgtaatcaggatcctaactagagtttgtaaatacatgaaaaaaaagtaagaagcacaattggacagtgtaaagggaaaaataaatggaggaaacatttgctaacaatcattacaatagaataataacccccctaattaacatgctgcgacaaattacagaaatctattttttatgtaatttttcctttacgccacttatccctgtgcagtattctttttaccatattaaaactccttattttaaattgtatggaacctacagaaatcagctattgatgcttctttctgctctattgtgctcccattttgccttttaagtgactcctcttcaaccctcagccagatcttttctaatcacctgtctccgaattaaattaagtacagtggtcttctgaatcattcaaccagtctaactgattttttaaagccgtttaatatttgcttacaaaaaaaaatgcaactttttgtctttacataaagacaaaataagaattattgtaatatacacatcaaagtttcctgtttctatttccccaagtataactttgtacaaacaaccacagactagcacacaggcatctatctaccttgataaatttgcaccttgagtttgtaaccaggcatttcctgggcaaccagtccttcagggagtgttcaaatatttgtagtggggcagtttgggctgcacatattttagttcttattcatgcattcctcatttacaagtcgtgaacctggtaaatttccggttttaagactatcgctccttcttttctgtaggtggtccttgaactaccctctttgcttaactgtggagtgtgggtcagactgattgtcagaaaaaaaaaaaaagttttctttttctttagaaattatttcccaggccactctatctctatgttcaaattcccaacttggcaaatgagtctacaggtttttcaatcaaaacctctgctctgaaagatacatcacatagtggttaggatccagggctctagattctcatagaaagagaggcagcagagtgtagtggttaagagcacacatcctagagccagactaagtctgaattcgaggtcttccacttattaactgtatgaccttggacaaattatttaacctctccatgcttcacttttgtgatctataaaagggaataatattacctacctcaatgggctattgtaagaattcaatggattgaggtatctagagccttagaatagtgtctaacatacagtaaacactatataagtgttttctgttaattagattagaatcttggctaggctacttattgtgatgccttgggcaagttgtttaacctctgttaagcctccattttctcagtggcaaacagtattattgtgtcaattgagtaatataatacataaggcatgtattacagtatctagtacatagtgaatcattagctattatgttaacacatacttagtggcagtctagtgtatcttcctcttccacaacatgcttttattaaaggtgaactagttccaaagtctctattgctttcccatgccatcaaatctacaatctttgttctaaccaaagtttccaaatttatttcccttattcactaataaaaactctaccataggacatcttttcataggctatacactccaagctcgttatcacatcttcactttaatatttactctcatattgcccttcccttctccctgaatatccaaatcccatccagtctttaagaccaaagttccagaaagttctttaaaattatcccaatcttgtatgctttttgtttctctgagttcagtgtgtaaaggggacagttccagtgatttagattgatgtcctatctctctcactatgaaactgtgtggcctagagcatgtcactttgccttctggtcacagttccctcaaatacaaaatgattgggtttaaatagatgatttctaagagccctatcaccacatcattctgagacctattgcactcatattcacagtgcaatgcttattatagatgcttaataaatatctcatgcttgaaccttccagagctgaacatatatggatcagtctgtgggtccctttgctactgcctctccttcttaatctccatcacatgttcccatttctctattactccaccctttaaatgttagtatttccgaaaattctgctctctaccctcttctcactctcatatttctaggcaaactcattattatccacctgataatgattcctaaatctgtatttctaacccagactccatttccaagtttcaaacttatatatccaacatctggtaggtatatctacctgaataattcagcatgtcaaaaataaaacccttcttctcacccagtcctccaaacctgatcatcatcctgtatttacatgatctgtccaccaatacatctctgacttcaccacataccacttccccttgctctttctactccatctttactggcctcctggctacacctaaaacatgccaagcacactcccacttcacatactttgtaattctgttccttctccctggaatacttttttttaccctaatatccatgtctcctgcattcaatttattcaaatcatttactcaaaaggaggcctctctgagctctataaatgtgtaactatcatcactctatattcttacttatccttaacctatttttcttcatagaatttatcactacatgatatttatctatttgtttacagtctctatcttcccaaactttgtccattttgttccttagtgtattatcactgctcactgataatgagcagtgatttatcattggtaaatatttgtgtaattaaataaacacctatcctgttgaacagaggtgtcaactgtcaaccaatgcagaaatgtgggagtttgcttaaatttcttcttagctaaatccaattaatcatgaattctatagatttatttcctcaacatcacacaaacccatctcctcatctctattcctacttatacctccttagccgagattctgtcatttcttcccttttggattacttcaatagtacctcaaatgttctccttgtctctacttttagcctcctcttttgagggggctaatatccaaatcctatccagtctttaatatccaatatctgtatttctaactcagactcaatttacaagtttcaaacctatatatccaacatctagtaagtatatctacctggataattcagcatgtcaaaaataaaacccttcacctcacccagtcctccaaacctgattatcatcctgtatttacatgttctgtcccccagatttggttaatcatttggttaaatgattcatccaagatcacataccaaatagatattctccacactctcatcagagtgatctttctgaaaggcaaatgtcatcccattctcttgcttatatcctttaaactattgttcttaattggtcataaaaggtccttcaatatctggtgcatagctatactctagcttcattttgccacacttgtacttgttcacttcattccagccttactgagaaatgaatttatttgtagttccctaacatgcaatgttcttcatctctatgaatctttgttcagactcttctctctgcctggacaccttccatcctggttcacattccttctcctacttcaaaattcagattcatatcaaatgtcacttctttgagcaagcctcccttactctatcaattgggattaaatgctcttcctctgcacttctatggcagtcagtgaatatatctaccataacacttagcacattatattgttgccatttactagactgtgagcttccaaagataagtaatttatctttctttttttattcttgtttccagcatagtacccaaagactagtagaaatttaataagaaaactttattaaactcattcaattcaaaaattgttgagttaatctctatgctgaaattaaacacatctcttcattcttggatactttcaatgcatctagacactgtgccaccagctcctctcaaatccccccttagttccttccaatttctgtaccttctcaaagctagtatttccaaaagccatcatactccttggtgtatatattatgttcttgtggctttcgtagggtatgactcccaggtacaacttgttctcttctgttcaaaatgaaactgatgccaaaatgcaacaacaacaattagtgaatctcattaatagatttcttttcccacatctcccaagagtcaacttatctttatctcaactgtaatttatatataaaaatcatatgataaatgtcctgtttcttcatattattggtaacacaaatgatgactaaatgtgtatgcacatgaatatgtgtggagagggggcacccaggcaaaatgaagaaattgtaggcaaggcttccaggagtaataaaaaaattcctcttatctgcttgtggctttcctgggtgttcttttaggaattcagaaaaaagatcttggtgaatgtgatatgggaattgatataaaattttgctctatgtgaactgactcatcattattattatgactacacactttttcaatttatatttgccaaagtatttctctacacattaactctaataattcttgcattagtcctatgtgcttgaagttacaggtgtgtgtgtgtgtgtgtgtgtgtgtgtgtgtatctgtgtgtttgttatctttttacagaaaagtctcacaaaggttaaatgattcatccaagatcacatgccaaatagatagcagagccagactttgaaattattattttcaccattttccatctcctttctttgcaggagaaagacaatgcaaatagtcccaataagctcaccttatacctaaatcatatctaccaatgatactacagaaataaacacttttaagagaatactatcatcaaactgtttattagtttttctgctgttagccaaaattatctaatattaattccttatccaaaatgacttaatgctcccagctgtgtttaaatcctcttttcctatcccctcctctaacttagacacaaattaacactagcatgagaacgctaaagatcagttcatttgaggattcaagactttaggataaatattactgtttcttatatttcttatcttttctacctaccttatttctcaacattttcatacagctctccaaaacagttacgtgaaaataaattggtgtttggttttaaaaaatactttgtttcctccctttaatatttttatttggccttatagtatcagtaggtaatttgacagagaaatattagatgatgtgaacttgtgaactgatagaaaaaataaggtaaaaagacctttatgcagtattctgagtaatataaaatctaaaatatatacctacagattttagtaacctaataactatgcacacaactttggaatcttttaaatttttgaccaggggaattttgggttaaatttaaaatgtaataaagtttgtaacatacacatttactaataaaatagtctccattctattgacatttattggcttgcagaacaatcagacttttgataagtctgtttctacctataaaaatctacttaatgcaacagaacattaggtaggtgaaacttcattattaccaaatgtatgtaaagtggcagaatttggaggacaagtactaaaacatggagcaaaatttctaaagcagattttttcataacagttctgccgtagacaaagtcatggggtgggaaactcggaaaggggactaacataccagaaatgcaggcctcaatggtattggcaagacctgataaaattgccttagcataatactaacatattgcattaatgtaacgtacaaggctgctgcagatggggttctctaaaagctacaagataggtttacggtttaaggtacaagatatttactagggaacaacacttgtaaacaggaaagagaagaagacaagattgggcagaggaagaaattgaactatagtattggcctaagaatacttcatccaactcagcaggaagccctgaagtcagtgtctaatttcaaacctgaaaggcccaaacttcacatccatgtccttcactcaaatgggagagcctgggaaggatatgacctggggttaagtggctctctgcagctcaggcaaactacaggagctgacagatggaagctgtatgttttacagtatttctgtggctgggaagcaagtgcatccttagtgatgtgtctggataacacatgcccatatataccataatgacttatcttaaataccagtttgtggcattatgctaagtgttgtaaaattactttacggggtggaggctaatgtggtttttaacatgaaggtgaaaaaataataatcctttatgttaaagcagagtagtctataagcctgtcaaagaacacagaaaatacactgtcagaaattatggattgaggataaaatgtaatttaagaatgtttcattttcttaaactagattctgttcagacttctaaatttttcttctttcctgaagcctacaaaagcagcacagtgagcccagggggctaattatttctgaccatgaatgactttaaaatatttctaagttactaaaacatttttggaactgagctctctttttaaaattcttcaattaattccaaattctcaaaaaaactacaagaaagttttaaactcttgatccaaaaccgatgatactagttaaataacatgcagccactttagttcaagaatcaatgatttaaatatttgattgcttagctttttaatgtttctgtactttatcacacccagttgaatgctggtaaatcagctttcaaaaaaaaagtgggggagggtgatatggagcatttgccagtttccatggtgtaaatggttgatttcaatccaccatggttgatttcaacctataaacatgatgtcactggacaagaagttgggaaaagatacacacagttggttcttatgagccagtgtgagttggctccagcacaacattagtacacctatttctttattttctctttattcttggattgtgtgaggactgtaacacttaagatttgacaatgaatttgatatatatatatatatatcagatatatatgtcttatgtttaagattatgtataaagtcatatatatagtcttgtatatatatatatatagtcttagacataagaattattttagtagctaataggctctagtagctgttcccctaatccaaatattatgtcaagtttatttaaagtagtaatggaaaccaaattacaacaacaaaaatcacatccaatgcacattctgaaaagggcacaaagagtgggattctgaacagacaaaagcaggacaaaggaaaaatgctgacctcctttactagcgccacaaaactcctgctgagacaaaaagctgctcctcatagtcaagtcggatctctaccatataacactcctggtgctaagttttctcatttttcttttttcttctgtcctttgacataactagaacctggcacatggtagtacttactgaaaaagtgaattgcagacattttcttgttctcacttggccttgccttagtgtgtttctctgccattcactgttccaacatactaactcatggcaggaggctaaagttaaggatattttatcagattctggttgtttatggtcctcactctcttatcccttcctggaactatgaaaataaattaatagactattctgtttcttccttgtcctaaatttaatgcaaggattctgtgcaattatatataatagagttttcaagtctttcaatttttacatacaactgtaataattgttccttgcttggaaaaatcaaaactttaagttcaggatgatggatagcaacttcatcaaactagaaatctgtggaaatttccaaatttttacccagacattcttgcttataattacaactagctgcatcttatatccttcaaaacagaaagaattaggttcagaatattaagatatccatataggtcagaatatttttatttctttgaagacctttaaagtccgatattacaaaaccaactctgtcagtaactagatgttttcaggacataacatgtgatcttggacaagcaatacccttgatatagtttggatatttgtccccacccaaatctcatgttgaattataattcccaacgttggaggcagggcctggtgagaggtgtttggatcatgggtgtggatcccacgtggcttggtgctggcttcacaatagtgagttctcatgaaatctggtcatttaaaagtgtgtggcatctccccctcacactctcttgctcctgctttcccatgtgagttgccagctccacctttgacttccgtcatgattgtaagtttcctgaggcttcataaaaagccaagcagatgcccagtgccttgctttctgtacagcctgcagaaccatgagccttttctttataaattacccagtctcgagtatttatttatatcaattcaagaatagcctaatataccccttaaacagatgatagtccatctttaacagccttggttttcttaagtgtaaaatgagtggtttgaactgagtcagtattttccacgctttgtggttgtgaccaattagaaggacagagttggctttttaaaaatagaatagaatagggaaaatgaaaaaagggaaagaaaaaaggaagaaaagtgagaagaaagaggaaggagtatatgggtagaatgagattaaagaaagaagagagtagggtgaataaagatgagagagacaagataataaaaaagaatgaaaaagagtggaaagatagtgtaaaaaggggaaaagaaaaataaaaggatcagataagagtatgaaaaaagaggagggaagagaaaataaaaaaggaagataaaaagaaaatatctcatacagagaacattacatgttgtaagacaagtctcatttaatgaaatttctgtttctgttatacacacatgtgtatgtatgtgctatatgcatgtattgggtagtgatgtgaaatgaacttcttactgtggttggtctgaaaaaagttgaaagtcagtgatctaagttctcaaggtccctttcacccaaaacagtttaagatcctatagatttttactatgccttttataaatgaatttatttaaagggataacaaaattatatttatagaaaataaacatgtggaaaggattgcaactactgatagaatgtataatcctaactttttagaaggttaggtagcattcatcaaacaatggtctaaaccaggctttctcagccaatatctcaggaaaaacaaaatctggaggggaagaaaacaaactcttcccacacatactttccaaatcaagtttgaggatgaaaagtatctctcccttaaagtgaaaaacaaatcttgctaataaatcttgactaaagtcctaagttataggttaaagcattcttctggggccttgacgctacatgattttggcttctaagcctaacccaaaaggaatggcaatccaagcaagatagcaacctgcactatcttcctctgtggttcctgtgaactgcagttaatcatgtggtatgtattttgtcttctatgaaaagttggggcattgacaggtatatttgtaactcaaccatggaaccagggctagttctacttaaggccctttatttctgaaagagacaggttgcgagacaaagaagagctgagcctctagaaattctttttcaggtgttttgttttgttttgtttttgaggcaaggtctcgctctgtcacccagtttggagagctgtggcatgattttggctcactgcagcttcaaactcccaggctcaagtgatcccacctcagcctacccagtagcaccaccatgcttgggtaattttaattcctttttgtagagatgaaggtctcactatgttgcccaggctggtctcaaactcctgggctcaagcaatcttcctgccttcactttccacagtgttaggattacaggggtgagccaccatgcccagcctagaaattcttaaatagacattaactataccttgcttaaaagtgctgtatgataccatgttcaatttaaagcaaataaaatgtatgtaaagtagtgtcttgcttgtctaccatttcactttcctccatcagaatcagtggatcttcagtatttaactgttcagtttataataattatttttgtacttgttttcaagatgttctgcaactgttctcgcattttaaaatacatggacattttgtctctctggctcctttgaaagttcatggagagggccgggcacagtggctcacgcctgtaatcccagcaatttgggaggccgaggcgggcggatcacgaggtcaggggttgagaccagcctggccaacatagtaaaaccccgtctctactaaactacaaaagaaattagccaggggtagtggtgtgcacctgtaatcccagctacttgggaggctaaggcaggagaatcacttgaacctgggaggcgaaaggtggtgagccgagatcgcaccactgcactccagcctgagcaacagagcgagacttggtatcaaaaaaaaaaaaaaagaaagaaagaaagaaaaaagaaagtccacagagagacaacagtatgtctcatatttcctgtattgattgacttcatatagctaatttcagtcttcttacacagagcagatatgctttaaggctgtgaaattaactggttctttttatctatattgctaactgcagcttttcctattgttgattactaaaataacaaatagtaaagcagttctttaaaaatctacttttagaggaatgattttcagtatattttctcaggagttccagcaagtgttactgttctacttggtatttgcaagccacaaatactaacttgaaagccataaatactaccatcgcatttaagggatatacccttgatgttgatagagctaaaatacttaatctatgatcagtcaacaaagctcattaaaattttactaaattaaaaatcattttacttagtatgattattgctcaaatgtctctcttactaaactgtgagtttcttaaaggcagagacattatctttttcaccttggtacctttagctaagaactaagggacttaaatgtttaaagaattgaactaaatctacaactctcaagatttcttattttaacataatatacataagaattatagaagttaaaatgcttaaaaagataccagtcagtaaactaaggctgtaaaaactatatcccttactattcctttctgaagtttccccaaggaactacatagcattactgattttcaaaaactatagtaaagttcagtaatgctaaatgacgaatcctaggccaggtgcagtggctcacacctgtaatcccagcactttgggaggccaaggcgggcagatcacttgaggtcaggagttcaagaccagcctggccaacatggtgaaaccctgtctctactaaaagtacaaaaattagccaggcatggtggcatgtgcctgtaatctcagctactcaggaggctgagacatgagaatcgcttgaacctgggaggtggaggttgcagtgagccaagatggcgccactgcactacagcctgggcaacagagcaagactctgtctcaaaaaaaaaaaaaaatcctaaaagactaaatacatagcatttaaggaggtaatatttgtaaaggacttataaaagtccctagtatataataagtactcaatattagctatgtatttgagcccttcttagaaatacaaattattcactaatttagagatagaaatgaaggacaatgaaactgtagtataaatgtatacagtccaatttgctctttctaggcattttaattaagatcagagtcaacccaaaaaggaatttaagtgatttttttttaatgaaccaactatggactgtttatttcacccacattaccaactttaatcaagtaggaatttaacagctgattaatcagcaaacatctccgaattggatagactttacctcagtcaaaagatcaaaccaaatcctaagtttccaacattctgtttaattcatagcactattaactaaatattttagtacaatttgtttcatatgtgtgcttctgcaatatttgcttcaataagtgatgaacatataatggaagaaaaaaataactttgaatgtttccttctttgtccattaaaatgatttaagatttcaactattcaattcaacaacatctcccatgtgcaaagtatcaaactaggcatgttgggaatacaaaaatgaatacgacctcagacttcaggtaggctatgatcttgtaggagggacaagacatgaatgaacagctaaaatacaatgcatgtagtatgtgctatttaaaaggcccaagggactgtggaagctcagaagagaaagagataaccttgactgagtcaggggaaagcagtggtggtgatcagtgaaggcttcatggaaccaggccataatgaaattctaggctttaaaaagacaaagataaatgtgaggaaaatgggtattccaagtagaaaaaacattatgacaactgatttggagatgtgaaagtatgagtcgtgttctgaaaattatacacagacaagtttattaactagtacaaagtaaagctagaaatagctttactgagagtaggaaccatgttatggagggccatgaacattaggctaaaaacactgaactttgaaaactacgcatacattgacactctcaaatgtacattttcagtccttatctgtcctctgaattccagtcatgtatgtcctactgcttactcaatatctccaaacggatctctaataagtatttcaacaaaatagttcaacactaaacttttgatattctccctccaacttccagaccctcactcactgctgatatctgttcttcttacagcttttccagtgaatggcagaatctcagtgaatgtcaactccatttttctagttgcttaggtcaaaatccttgactttcctctctccttttcactctaaatctcgttggctttgctcttacaatatatctagaattgacttctcactattaacctggtccaagttaccaacactttgcctaaaatgccttctcatggtctccctccttctacccttccaccctttcgtctaattgcaacacagtagccagaatgagcctgtcaaaacccaagtcagggcacgccgttctttccaatggtctcccatcccatttgaagactaaagtccttacaacgatgtaaaagatcatctgtgttctcatttcctactcttttctctttcgttcactcactaaaattacccctaccctggccagccatactgtccctgatgctccttagctaaagctagcaagcccccatcagctagcatgctctgctgtttcctctgccctggaaggatctttctcctgatatgcgtatgacttgcttcttccattcctgtgggtcttttcttaaatactaccttctcccttaagtacgtacccacacaccctatttaaaattgcagtacctctttcccattccctttcctccttccctgctttttctccatagcagttcttgtagtgtgcagtaattttacttatctatttaatgcctgcctccccacagtggaatgtaaacttagcagagcagggatttttgtagattgccatatcctcaaagaccaaaggagtatcagaaacataacaactgcttaatgaaagtttgtcaaatcaaaatcatagtcaataggacaccattggagatatctcaacagaaaagaaacacaatgagaagttgactttaggaagaatattctggaatagacatataaattggaaagggacaaactaaagtgggggagacaatttcagactgtttcagcagttttggcatgacataacatgaatctaatgtgataagaggtattttgaggtaaattagactagaattggcaattctatgatgcataaaggaaaaataggtatcaaatatgatttggagtgatgacgtcatttataagaacaggaagtataaaaatagaggcaggtttataaagaaatgatattgttcattttggataacatcttaaataataaagggaaagcaagcttaacctaattaattcatgtcataaataagggtcctagaattttttgtgactctcatttctgaagtccctactgtttctcatattcagatgcacttcaattctggaacaaatatagcttagacattagtttaagtggtttggaacatgttatttctactaaaatatactttcttatggaaaccactatatttctgggtagaaagcaaggatgctaaggaaaagcacctgggaggaaatggcttttacttttttcttctccaagtcacatagtcaccatttcacattctaagtaaagataccaccccatatccttcagagttaggtcatcatggctgtacacaaggctcagacactttcagaagttatttatactctagtagaaataggcatgcaggtggaaattatggtttttttgctacaactgctaatagcatatgaaaaatctgattcattcacaaagaccactttgataatgagatgtaaccaagttatcggtcagctgtccatcattacaaatcaaatcaacaatttcttcgccttttctatcatgccacacacagctaccatgtacagcagaatgttgttcccatgaaatgatactgttgcgtgtctgactttgtgccaaacttccatatttgaggatttcctaatttttctatattaaaaagtcaaaatgtaagcttgtaatatttggggaatttttaacaaatttattgtaaacactctaaaattatgtcatttattttatttcagatccatttttattcttaaaacatagaagtttagagttggaagagcccttcatttatagataatgcttctttgtaaataattcaaataactggtacatcctgctttaaaaccatacaaaatagatgaatcagaagacaattattgtttgcatttaagtagtcctatcattataatataatatgatataaaagttgcagcacaaatacatttaaatgtttatagatcattacctgctaaaagaagttactaagcttgaaaggaaaagtacagaaatttaaatatcagtagtcaaaaattaagataaatggctaatgaggattataatacaagttgaaagggaaaatgatcaagtttacaaagtcttttttaaaaaatatgagtgatgaaagtagagacatacctgtaacctcttacatatacccctttaacagatggattttcttctagaaattgaaacaaactaagagaatcatagccaaacactcacagaaaatgttgaaataaagattccctccatattttaagcaattactgtctaaagaaaggattcacagtgttgccaaggatgctgcttagtaaatagtttaaattccttccacttgagacagaaaagatccaaagtatattagtctttcccctccccctctagtgaattaatattccatgatatacaccaccatgaggtgctgatgggggcacctcttttcaatgaacagagatcagcaaatggctatttcacaaaaaattaaaatacacccttgtaattttaatgtgtgtttatgtaaaaaaaaaaaaagtggtagattcatgttaataaaccttgcttagggaaaaaataaaatagttgctaagccatcgtgagtaattagccttttagcatcccctttcttcaagaatgcttcctcctgtgttggttcttttaaatagctccagtcctggctgtctttgttgggcttcgaaattgttcacatatgagagaaattaagccctcatttaacagagacacatgcctgtcaagaccagaggaacaaagactagtccctggggcctgttcagctcccagaggctgctactcattctgttagcaatgtgtataaaacctttacagaatgtgtataaaacccaataaatcatttcatctgctgtgcttaatacatgagagctctaaccacttttcaaagtgttttctctttcttatacaacttcacagctacttagtcttaaaaaaaaaaaacctttctatcattcatttttttcagaatgcaatgacttttttagtcaaaaacataatgagaatgtccccagtcggcataaaagaagaagcttatctttttagatttcttgccagatatctttcccacattttatggttaataattagaatactcattttgtaaagtgacggtacatctcccagctgcttttaaacctagctttggaagctagccctggcaaaactgaaatggttaaggacccgaatgggacggacttgctgtcctcttcaaattcaatacattttgtccctttggaacacaggggcacatgttctgtcaaggtggagattaaaactactgcgtaacagctcttttaactaggcaagggaaatggtcttcttataagcccaactaaaataccctttgtgcattctcatttccaaagaaaatatggtgctcttttgaaaaaagaccacattatcatttatgtacaaatcaatcctatactgtcccctgcttcatttcccacctatttctccccctacggaaaaacatgaaggctatgggaaaagattaaagaccagactttaaaagccctccagtttagacctacccttatccaaagtagagtaaggaaggtctgtggagaaatgagtatttgtccataattattaaaataaatacttcatttaaaagtaaaatgctgtttaacctgattgtgttgcatgtagagcaaacttaccaaggagttactctagcaaagataatctttccacagaaacactgggagttccagggctaacagcttcaatcctcaagatgctgtgaacccccaaaataataagaagctggtagcacaagaaacttcaccctactcagcagggggagaaaaagcagatctggatttgataagtaaaaccagatctacccaatggttatatggtaaagccctgcaattaatggggaacataaacagtccaagaagccagtattgtagtagtttctccacaattggtttcattcatatctagttagatattaatcagatgcataactggcacaaatgctctgtacaaacacagaacggtacacgtgtctggttattaaaaaatgaaatagagtacatcagactcttttacattcatatttttgtatcccaaatgatttatcatttttaaataatatctttttttaaattttaaaccacaaatcacatcctgcaggccttagcaaaggcagatgtcaggatgtggtagtacaacaaaataaattaaataacccttgaaaaaataaaacaaagtttatttataaaaaatgacattaaggtgaactgcctaataagaacatggatttgcttaaataaaacattatatggttctgttttggattcatccctaaagccctgaaagatattagaattttagtgagtaattaccctatttactacaaacaaaatgggaggaaatcagaaaaccgtattaagctctaccacacatcagaaatgaaattctctcatttttaaatcctgcgacccaataaattgtagttggaaaatgtactgggactagaaattgaaacttaacaagttagaaatgaagaaatggccaaaagaatatccatatcaacattatccttcaagcaggagacccagttctagaaagcataactgagaagtctcccttcacagcttaagtgttttgagactgcctgaacccacccccgacactcaacaccacccccacagttagacaaagttctagccacttaacacatctcttttcaaatgaaaatgcaacacttggggtgaaaacaagagagactaggaaaaggtgttatgtgctatatatgccactgacataatacttcaaaaggatatgcagtaatttcctgcaattaataccttagcaaagctataaggatttgtttccaaaaattatgatatttcacttgcaacactaaaattaagtttgtgtcactctttccattatatagccgtaatgtcaggagtttgtcactggctgcagaaatgtgtttgctgttccctgaaagcaggcctttacaggccctcttcttaaatgtatttttctaaaaatcacctacagccattatttcatggggcaagcattacaagccatcacaatacttcacaaaggaaacctgaatttgatctcatcattccagacccttcaatggtttgaaatggaaacatcctcctaagaggacacgtcttatgctatggccaaacttgacgtttgcctttgagcttcctaagcacgactatctactgctctccttttttaaagtaacagagtcaattcctgtcatctagaatcagaggccagagttgcaaggaacttcagtgataatcctgaacaataatccttcttcaaatatatggaaaatgaaaaggcagaaaagtcatttgctgcaggacaggtagttgctagcagaacaaagactaggcaggcatagacatcctgagttcaagtctaggctactttctgtcaactaatctaatcatctttctgtcattgttctaatactatttcgtctccaagttggggctgcagactttacataagagtgagaagaacaacttctgctgagagtagatcagttatcatctccatgccttttttttcctgggcttgaaattgtggcctcccagagccaaagaggacgtataagtctatggaatttactgtgttccaggaaaagctggttgggaggataagagttagaaacatgtatagatatcagtaaaacagactgaaagcattggcaagatctatgcctacatagaaaagtgaagttaggctcttgaagttggcatccacacaactgcttttctgttaaagttttctgatttagttccaatgtggattgttaggtccactggtctttgagagggccctctcatggactccatcttagaactggagtatatccttggaacttctaagctcctggggggtttcttttgggagggaggtttcagaccattgttgattccatagaagaagtaacctaagctctatgtttaggaccttggcctccatatcaatgcagtatctttccttctcagtaagactgacagtagagacccaaatttgtaatacactctatatatcaagtggttaagtatatgatgtttagggcaaatgtctttgagtattaaaattatttgtattaattttcttgctttgggtttttagtttttttgttttttttttttaaactactagaaaagtgtttgttttttttaaagaaactactagacaagaaaaactactagtaaattttttatttagaaaccactggaaaagaaaaattactagaaaagaagttttaaaactaaaaaactagagcaagaaaagtagtcaaaataactttactactcaaagacattttttctgtagttttttcttaaatttctaacatatatggcttttgtatattaaaaaagttgaaatttttatattatttatttattttatttcattattgatttagagacagagtctttctccatagcccaggatggagtgcagtgatcatagctcaatgcagcctaaaactcctgtgctcaagagatccccctacctcagcctcccaagtagctaggactacagatgcatgccatcacacccagttaatttttaacctttcctttgtttcttttttttttttttttgtccatgagtggagagtcaaattctcacctctcagacaaaaatgggctttgctattagatccatagtgcttgtgaagttagaaggatggtaaatgaacctttccaatttattttatagcattttaaacacagttgaagttatgaagccactgcagaaaactcaactgcagacattttaagagaaaaattttccactgaaacatacatgtatcaaaagttagagtccagactacaacctgactgaggatgtactcaacccttaattctgactatgaattccttaactttcattgtttgatattacaactttaacattttcttaatggattgagcagtggataaaagtaattcagcttcttacaggagatactatactttttgcatcatttatttgctgttattttgtacaagtaaaaatccatgactctaacattaataactttgagtgggaagttactatatgtgaattaaaaatggttatgtcagtacatcccctcagcatttaaaagatatttccctgtgctatatcaagtgtcacatagtatatcaatttttatttcccatctctcaagtctggtatgcatactgtttaacttcttaaattctaagtatagacataattcacaaaagctaggcaaatgcttgacttacaggagatggcatacataagatttatatgaacaactttattttcagcaagaaggacttttgcattttgtgcagctaaaacacataatttcaactgtctttaaaaagctataaaataaattggaaaggttcatttaccatccttctaacttcacaagcactatgaatctaatagcaaagcccattttagtctgagaggtgagaatttgactctgttttttgaaaataaaatgttatgctctcttttatacaatctccaagctgctctaatacttggtcaaccatttctgagtgcctgacaaaccttactctcactcactgacagttgaaaagctctcgtttggcagccagggaaaattgttgcactttattttcctctgtactatcatggtgataataattgattatagtacctacacattgattattctatattcacatcactaatttgtgggttctaaatatgcatgtgtgtatagatacaaatgtgtgtatatgtgcacatgtagaatatgtacatgaaggtttctctattagaaactctgaaattattcctatacctagtcatacaagaacaaaaacaacaatgatagtggtatgtattatgcttaagcaattactaggggttttatataattatctcaaagctactgtaaggtattgtaattatctttaggaattaggaaatacaggctgagagacattaagtaacttgtcttacagctactaagtaacaaaacagactacagcgctaacaggtagtggaattgttatttaaaccctaatttatttatctccaatacctgcactggttctataaaatttttaaattacatacattccgaaataacacatcttattctctacatcttttgtttatatgtacaaatttacttaaaagtagattcagagtcatacattccttacatatgtcaggatgcaagattttttctatgtcttaaagttttaaaaaacacttttaaaaaatgggttgatgtttgtgttaaaatttattctgtttagaaagttaaaagccaaatggcatctgagattttattttctaacttttttgtcttatttttgtcttattttgtgcttcatttttttcatacaccttctccaaaagacacagaccttctgatgtctatacaattttagcttgccaatatcctcatagacaaataaaaatcaagttattagaaaaactaactaaatttatttaaattgtttaaaccatggtccattaaaagctttctagctagtaagtaaaacagctatgaccaaaatgaaaagtatattttaactcatcatgaactatttaaggtatactccaaccctcaggatggatggatggacggacagacggacggacggatggatggatggatggatggatggatggatggatggatgagacagagagagagagagagagagattcaacctaaatctaaacaacttagcattaacctttaatcatttaatcttcattaccctgtatagagcagtatttttccattctgattacccactagaatcatctataaacttttcaatactctccatgctcagactgtatccaagaccaattaaataaaaatctttgggataggcatcagtatttttaacaagattccaagtgattacaagggacaaccaaggttgagaaccactagcatggaatgctgtcactcactgctcacattcatcagatgaagaaggtagttataaaaaaaagttattaatattaaaggtgtctgaccctcagtatagtgacacatcacgttaaagccctcaggaagtagtataattaactgtctaaaaggttcatatgtaaacaccaaaagagtcacccagccatatacacacctcccattgcactacaaaaagattccaattatattctttttatctcttgccttgtaggtatatacccacagctatagtagttctaagggtagagagagtctagtggcaaattttctattttttctatttaaggataaagagaatgtaatgacattttagatgttaggtattattagacacattttgtaaactaggaaactgaagtgcagtaagatttattcaagtcacaaaaagggcaaatggagaaaggatctgaaatactggaaacagtgctccatcaggcatcaagaaacctgggttccccttgtggctctgataatacttgctttttaagctcagacaagcctctggtctatacctcagtttcctcgtgtaatctaaaggctttggactagattaagcatgcccaaaggttttatatatcatagatcagcaaaatttcaaagacaagcaaaagtggagacttacatatagttgggaactttttattttaccaaataaaactattgaaaaacaaagaaagcacataccacctattatcaccaatacttcatagaaaggacattttaattccccaaaaggtggaaaaacataatctcagggttattttaaagtatggcttatgataaacttactatattgtcttcaacatggatagctacctattctccctctatccagtgaatgagaatcatgatgacgttttcgagtttaacattctgtgaaagtgctggcagggtagagggggaatgtttaatacaactcttactgtagtactctttcaagggttccccaaaattccattagagaactatcttcataattttgtcatatccaagtacctaattactatttgcttaagattttaatttgactttttcttttggtgtatatacacttcaaaaggaaacttcatattatacttcaaatagaaaattaaaatcacctgccgtaaatagaagctaaccagataaccatgtaaaggaaaacattaaatttatttaaattccagctgactgccatattgcatccaaaggctctgagaataagatgatctctctctctctctctctctctctctcattctctctctctctctctgattttagtacatactagaagagtattaaagactaacattaaactgagccctcaatataatgagaaggatcaaggaaaaaaaaaatagaagagagacattttcctattcagtattatgtaatgtcacatgctggcctcacctggaacatctggcccactctgctgcacctcactctgcctctgaagaggtaaggcactcttccactttaattccggaaagaagcagagactggtttccctgaatttttagtaccactggtttgggagagagctggggagtacagtgcagtctaagagataagcacagatagagaagggcgggttgtgtagagactgaagtaactgaaggatagcgcagaaaaagctttgagattcaccttcaggttttggtatgctgaatgagatctttgccataaggccacactcggaaaaacaggtaactagctgattccattgagtagctcttgggatctggtcagttctcttatttttaggcgcattccaactataacaaacagtctagcatgactaatgtggaaaaactaaagtgtagttttagttcacaacaagaatttgtaatttttgctgttatagcccttgctagtcataattatagcagctttacctattctttataacccagaaactttattattaaaatgtttgaagcagactatagagcatctatcatgacttttaaagttaattagattacataaaagaaataattagatttgcatttttatcttggttttaaacatccaaagatcacaacagcctgcctgtgggcaattaaaaacagcatacagcagagacatagagagaggaaagagggtctgtttttcctggctaattcatgattgaagatagaattacaaaatattttaagggcttgcggaagctaggggctaatcctagacttctaagctttgtttatacccctcatttctttgcaagggagtatcatatgtatgtacagtgccaatagaagtatcaaattactttcaataggtttatttagtccttttcagagaaagttggaaggagatccattacctgatcaataacatacaaaaaacgactatttgccagagccaaaacaggagcactgtaattgcattttgttcatcaatgataaatacaaataacaaagaaatacaacctaagacagagggactatgtgggattgaagtcagcttctgactgtcctcggtttttctgttgggtgctccagccatttccaaaagacaataaatggaaggtgcagctcttaaaattagaggtcaattagatacttaatgatgaaacatatctccaatatatatctattattattatgctagcaaaaaattaattaactaggtcaagcaggtcatgaaggctaatgtacaaagcaattatttctgatctttagacaactacttcacataaaaaggtagtcctttattctgctcagcagatacctgaaatgcctgtagttaatcatattgaaggaaacaaaaggtaaggtctatctccttaaaaggtgagaggacatctcaagttattatgtttaattgtttaaggacaatcacttccttgctgataatattagcatctttctggttaccaaaaaggaagaaaggataacacacatttaatgatgctctaccacgtgggaaacatacagactcacaaaatatataaatagcacacaggaatatattataatcaaaattaaaaacactgtatatgaaagataatcatatatgcttaagaacagagtacaacttcagtgaagtaatgaacactggtttgggtaaaagaaaataagcaatatgtatttcaacatttaaaagaaaaagttttcagataagacaaagaatatttgcaaagacgcagcaatggcatttagttcaggccttctacaaataaagtttgccatctaatgcatatgttaaatgatgaggggagggcaatgaatattgcacattaatcataaagaaaacaaggcactaaaaatttcaagtctcacgattttacccaaaaaagacacatgtgtatgaattgactaaatcattggcccttgcccagaaagccaaatgcctaaataaaaccccatccagccagtccattcttaagagatcgttgtttagttagttatgtgaggagaggacactgcctatatagctcacaatataagccacttgaataactctaaaattggagtctgaagagacacaaataattggataatactattcatccctggaaaaggaagtttctcacagagatattttaatgagctgaattcttttgcaaagactcagttctagttgcaaaattccatcgttaaatgtgttcctattgatgtgctatagaaaccaaagaatgtggtatattggatccataaaaaaaatctccagattcaaaaccatggcctggtcaaatgaggttagatgaataaatatgtgaaaaaaatcaagaaatgaggatttataaaatattttctgttttgcctagaattgtcttatatttaatcattgattaaaatactgtaaacatgctttgatctgtttacaactgtcaaattaattaaaagtgaattctgtttaccagttagcataactcagaagtaaaatgcttcgaaatattagctaagatactacagttcaatgagtgggagggggaggatgaaattactgaagcagttatctttcctttgaaattacagcctatgaatcaatattcccaactccaaagatccatattccatgacctattagttttgctttccatagacttggtaaaaaatatgctatttctgtcctggaaatatcaaaaatatctatttttttcctgggctccatatcaggagaattacttcacatgtaaaaaattagagaaatcatcattttccccaaagcacagagggatctgaatttacaaagcaaacattctccgaaaagacctaatattaaagtgatattttaataatcatttataattattatcctgatttattaaaaggtaaaaatggactcatcaaaactataaaaacagttcacaaaatcatacatcttacttttccaacacggtttacttggctttagaagaatctatttaaaagtttagttagaatttacgaaggcaaaataatgttaaaaaatatattcaaggaagacatataaataaaattgttcttaactgcacatataagttctgaataattgcaaataaaataaacatgggaacttttacaatactatcttaatcatgccttttcctatttctaatgaaaaatcctgtttttcaatttgtggaagccattcattcattttcatttgtttccattataatagacccagatgtgtctgtgtggggttgttacaagaggttaggcactcttccctttgtttctattaaagcttgcaaattggggggaaaaaaacagtactatttcagaagacagcattctaaactagaggaacgattttgaatgcaaccacctcatactcatgacccatagccagttgccatgatttaatcttgctgaccatgtaagctaataggttctaggactcaagatataaaaagaaaaaaaaagtgtcaaacttgctcaaattgtctctgtattcatcatttgcttttgaaagagaagttaagtttcatttttaatatatttaataatctttaattcacctttaataattttgttttatcctttgttctgttttgggttcaaatgagaaagtgtttctttttttgatagaaaaaaaatgtttgaagcatccctcaagtctcatattttgctcagaaagcatttaaaattaatccaacaataatctctctcttaaatttgattaaatttcaaaagccatatttgaaaatatagttaccctttccccttccaaaaaaaaaaaaaaagaaagtctgaatgtcaaatacctgttttgtaagtctcagagatgaatacattttgtgattttgtgtaaggagtacgtgtttttcagcatttgaaaaattttttgaatggtctcacatgtagaaggtaaatactgacaagatatgccataaagcagtagctcaggacagaatgaactataaatacaggtcttattgctttctcttattttttaaaaaatttgagttcttattacaaagaatcttatatttctaaagtgaatgtaactctgacattgactatctttattttataatttatactgctaagttcaagtgctgattagcttaaattaaaaaattaaacaacaagaaatatccacacattttaaaagcaatcaaacttctattagaaaacttgaaaaacattactcctatcttttcaaattgatgtttccaaatgttcattccaatgaatattttaagatcatgttctgtagttttctgaaaaagatgtagtcaatttatactacacaatcatatataagtaatacacactaaaaatatttcattaaaatattctgaactgatttggttgctgttcacctggagttctcagtgccacaggaaaacatcagtgaagacaaccagtcagtataaacagcactggactaagaagtaaaatatattagaaaagaataaacaagtaagttataaagcagtagtaaaaacaataattaactgatataagaacacctcagggaacttcctccattcctgctttacaaataggagaaacagagagaactaaacgatcatgttatttaacacctactgagttcctacagagggatctacagaaaaatgtaggaagccacaggctaaaaatcttgacctgagcagtaggagctacactgaaaattctaataagggcagaacaagggaacacctggacagttatttaattaagggtctcagcatgagtcataaaagagatatcaggatgagaaattattccaagatttaattgtaaaggctgactgtcaaaaatgccagacattacaactcatctatatttggactttttattttgcaacatgtgtacttgaatatggaatactgaatacgacaaaaaccaacaaaaaagttggctaagatctcctactgaaaatagctggacaaaatgccaattaggtaaagggactgcttcagataccaaattagtactttaagtgcagtaactacctggaacactgagtatgattaacaaaatgaagcaaggatcgaaggtaaaatccttgttattcatcaatgagatagaatattgcagtaaactatgacctcatgctactgattttttttttaaaatacagaagggcatgatattaacctcaagaaaagtaataacataattcagaatacactggcccagctagtttgaatcaagatcccagcaggttctccaataatcaagggaaacaagagtctaccgtaggataggcataactctgtgatcagtgtttctaaggattagtcactagacagccagttccttattctagggctttctagaagtcacacacctatatttctatttggaaagggaaaccattttccttgcctatctcaaatagctgttcattgagttaaccatcaagtatctaaaagaatgtcggaaatcagaccatcacctttcctccccagatcattgtaattatgatctatatatttttacattgccataagaaaaagggattttctacaccatgtcataattattcaggaacaagtttttcttcctttttagactgtaagctccttgaagacaaactatcactcattaatctctctattccctttagcatctagaaggaatacaattaatatttgttaaggaacaaattattaacagcctttttccagatttttctcataattggtccaattagtcctaacaagtaaattaaaagtaagttctctctacagtactattacatggtaaaatacaaaacagaaagtggtcagtggcaataaaaaataccatctgtatgctacctgggagaccattaggttcccagtaagtagtgttaggcaaaaggcaaaaagaaaaaagataagggttattttgcttacatatcacatcagagaataatgcttaggccaccatctagtccatatttcttacattcaattatagaattgtgcacaacatccttgaaaacagccttattggtgctgtttataagacaggggtacatctgcagagttttaaattccattttcaaggaggaaagtatctaagtataatcagacgagagtaataaaatacactgacctggatctgttgctgcaggagattaattttgtgctgctgttgcagaagttgctgctgttgtctcgcaatctatcagaaataaagtttcattaagttaaaatgaaatgcttacacctctgccattacctcaggtatttctcctggtattacaacaatcttttaccgcacctctatgtgaaagagttcctataaaatgagagaggccaaatcagaaagatggatgaaaggaaaaatttttaaacaagtgccacctctctgctttatctgtaggaaaactaccccttctattatatttgtgagctattcacctatatctgcactggtcagctggaaatcatgggattttagaaatcgaatccttgtagaatagagatagaaaaatctctggctacatttttctaaatggcttaatttggatgtaaaaagtaaaatctgtaagcaaagacaggaaaaatcttcgtattattgcttaatatggtctatgttggcaaaacctttcctgatacaaagattttcagaactgatacatttacaaatattgttaaaggagtgccaaaggacacagcaaaaagtaaaaaatctttagctttttttgttgatgctgtatgtgatgtacaaaatatttttaaaaacaaattaagctgtaatttaacatttatccatttatccttttgagaacaatgtgtttatttcatagtacaggatctatatacaaattttatatttccttgtttcatccaacaatcaaattcaacatctaaacacattatctggtctataaaaagaaatgttaaccatttaatgcaagccctactgatgactgtctctggccctcaggaggtcaaatagcttccttaggataatagtgtttactatgaagtatgagtcaggcatcaggccactattgactcaaaagctgagctgctacagctcgaagtccagagagatgatccttagtgagaacacactcactgccaacctaggaagccagagagaaaagcagccagagagcactcaggactttgtttagtagtgcctttttgtcaagagtgtcttttcttcctatttcttcctacttccaaagccagtattctagaatgggttatgttggaagtgaaaatgagtgtaaatcagttccaagctatatacttcccaagcctttttaatgttttagcctatgcagggggtagtgcccaaattatatttcattcagcacaagatgacaaaatagcagtctgcttctaaatgttgctttctgattttggatgacaactggttcctactggaagccatgataaagctgcccctaatgtagactacagtgtgagaaatgagactcctccttgtcagagctttatacttaaagtggaaatagtatttaatcaggttgggatggcccactctgcttgtggatattcaaatcagaaatgtacaactcattctgcagctctaggtatagatgctggatcctctgaatatttatttcttcttagcaaaccagtgaaatgccactaggcatctaatattgatggtccctcctaaatgataaagtgctgcatagaaatgcatccaaaacaccacagtgcaattactatcatccactctagacgtatgggtttgacacagtgaagtatggtacataagcgccatgtggctcaaattctgaattttatttgccaataggttgagctacatgctcgcttcattgagcatgacaacctagttttaagtgtcatttaattttcattttgaaatataattacaaagtgttcactgtaagatatcactcgtctgcaaatgtgtcaagattaatttgtgctagcttattcacaagtgtcaatagttaattactgtgtcatctctggatggctaaatgacattctaacttctgattttttacagtgttcctttatgttattttccattaggggctgagtccatattcctacatgtgggcaaatattcaagcatataaaataccagacatcacaactcattaaaatcaacagagcatatattgctctatatactcctataaaatacatttaactgaaaagataattccagtaataatgtcagattcctaaaaactgcacattaatttagatctgtctgatctaaagcatcagggactactctataggatcattgttagattaatgtactcttatgagacaagaaaaaacatttgggaaagtgatttatttttaaaagacatacatttaaactttgctattttttcttcattctcaattctaagtcaatcaggtcaaatacttttaggaacgatgtactaatttgtattcaatgacttacctatgctataaatagtgaccatgtgatgtatcatccaaaccaagaaaactttcacaagtaaaaggaggcagggtattattactctagaaaacaggcattataccagggctatctggggaaaactgaaatgtatggtcacctctttggactttaaacctgaagaaaatcattgcaccaatgagctaaaagattcccaaagtttttctggaacagaaccccctttttctgggaggaaaataaggcccagagaaaagtcacttactcatagtgaagctacagagggattatatgtgatgtctatatgaataagcatccccaaatcattaatcaaatccaaacctgaaacaatgtatcattttagttatgcccagttgctatgatgccttttttgtacacatattccctcaaaattcttgaagaccctagatttccagaaggctttgttttttttttccatcttttcttatttttatttttattttttaggaaagcttacaacaaataagccaatcaatttgattactctctgagcctggcacattccacatctccagttcgtcagtgccttttgcagggctcacctgttcttgctgttggcgagcaaggtccatttgctgccgttgtttctcaatttgtgacgctgccagttttttctgttcatcatgcgctgccagtagctgctcccgtaaactgatcagctgggtaatcatggtggagagctgccgttctttttctgccaggctctcaggtgtacctaaaatggaagcaagaagagatctcacaagcttgagaaatacctggacgaataagggaaaggagggcagaatttagaaagggactatcctaagacatttaaagatctgggacaatgactggaggccattgagggtacaggaacaccagagagtaattacagcagtggaatgaaagctagggttcctcactgttcctgccaagagaaagtattgtcactggtaaaattctcactcactctcccctcttgctctaaaaaaagcagacttaccccattttctcctttttgcccccaatctatctgattaagctaggaaatccatgatatttaatatgaaagatcagaaactatagattatattaatattctataatcacctctaagctcagtgactaacagtatctaagacatagtaggtgcttaataaaagttacttgaggaagtttctgatccttaccctcacaaaattttctattgtacaaagatatgtcactgaagtttagaagttagcagtcaatctcttggccatagagagaatactacagagagaattaaaactgcctcaggtgagaaaagattgaatgtgatttttttttttcctgagaaaggatcaagtaaaattcccaagttcatctgtaaaggcaacagtgttgcttggggggctctatcacccctttgtcatttgtcatttttcaaagagaaaaaaacacattcaaggttgaaaaggttatgcataaggatatgctgtttaatgaatatgatgtcgctgaacacttatggtatgcactaatggtgctgaacagtctttttatgggcaaattgcacagctctcctaagtaaacggtacagaatccttttgtgaatctaaattagagcattttaccgcagcataagataagaatttcaacccactgtatctgaaccacacagatttcattatgaagaaatgatctgtgatttgaaagcttttcagaaaaatgccaccagctgtcaaaggggacaaagattgccaatttttgtgtgtgcagaaggagagacttccaacctccttatgaaaccccctcattcctactaagaaagcaccattacaatcccagaaaatattttaattatgagtggccttatttttaaagtagcccaaaggagaaagagaaacttcagaggatgcaggctagcacttgttagtatatgatttctgaaaggtaggactgacatcaacagagaagctaccacatttaggactatcgtgggattcttaatgtcaactcaggtccaaaaaaaaaaaaaaaaagaaaagctgtcagtatctcttatatcctcagatttactgagctcaatgatggcctaaaatcaaaattaaaggaaaaataaagttgttagaaagtgtattccactgataaggaaacaaatactgtatcaaggctagtcgccagctactccttctagatcctggaatttattaaaagaaaatgggtttttacttcagcaatgggaatttcatcttggtaaaaggaagaatttattgatccagaacttccaaaatacaaaagcaggttcccaaaaagaatcataagatccataagatctcttgaaaaggacaaaaagttcaactaatgtatttgttaatatatacaggaatgagaaaatacaacacaagaatgatattttttaaatttacatattgaataaatttttaattcaataaacattttctgaattgccactatgtatcaggtactataacaagaactaaggacagcatggcaagtagaagcagacacagtccctattcttaggcattttgtagttcaaaatttgaagagataggctgggcacggtggctcatgtctgtatcctagcactttgggaggctgaggcaggtggctcgccttaggtcaggagttcaagaccagcctgaccaatacggtgaatccccttctctactaaaaatacaaaaattagctgggcataggggtgggtacctgtagtcccagctacttgggaggctgaggcaggagaatagcttgaacctgggaagcagaggttgcagtgagccaaggccatgccactgcactccagcctgggtgtaggagtgagactccatctcaaaaacaaacaaacaaaaaaattgaagagacaccttaatcatgtaatcaaacatgtaaatgtaaactacaactacataggaatacaaataagacaaatgttctgtgggagtttaaccaaatttgggtgcccaagttcagggaaagtaatctgaaaaagcaacaaattaacagaaggataaataggagttaactagacgaagagttggagcatggtttgaaggagctttccagaaaacgtgaaattgcaatgacaaggaaactacaactgaagaaagggttgcaagagggtggttggtggtcaaggagcttttccaaaaaagaaaacgctataggcaaaggtcatgtgtgtgtgcatgtgtgtgtgtgtgtgtgtgtgtacacatatgttggggatggggggcagtttggtgtgttccagaaattgaaagaagttagtgaaacttgagcaaggaaaataaacaggaatagagcattagattaggctagagagctagtaagagggcataccattcagccccttatagaccatgtgtgatgatctacctatttattctaagaatgattcctaatcactaaagtattttacgaaatgagtgatatggtcattttggttgcagtgtggtgaatagattggaaagacatgagataaatgggatgtatacgtattttattattatattttgtgcaatattctaacatacgtgtaattgtatcataatacctgtctatatgatataagttaagagaaggtttattggatatagtgatagttactgtactataattttttgttaataaagaagagcttacacaggaaattttgggcaaggaccaataccagagttggatctagtatttagattccccaataaatactggaaatttttctcttcttccatcttaaacaatctttcaatcatcttcaacttactcccctttctcctctgcataggcacagagaggctaaagataatacctaagtgacttcttagcctcttctgttcacagtgaagccaaaagatttataaatgcattggtgcttccagggttaatagatatatataagtataactgaatttatggaataacaccatttagctgaatccaattgtaaacagtcagtggcatctaaattttttctttggacttaaaagatacacgtttaagaagaaaatgcagaaagcagtatttttaaaatgagaatttaaacactcatataaggctgtcactattttttccttaaacttgaggagtacatacagtcaacccccgctatctataggttgcacatccacttattcaaccaagcacagactcagccaatctcgaactgaaaatatttttaaaataataacaacacaataaaaaataacacaaataaaacaacacaatataacaactattcacacagcatttacattgtattaggtgttataagtaatccacagatgatatgaagtatgtgaaagaatgtgcatgggttatatgcaaataccaggccattttacataaggaacttgagcatcctcagattttttaatgtatatattttgaatagtggcattaaaaatgaagttggagtgaagcatagtagtgtaacaagtctgaaattccccctgtattggggatcatatatatagccaagtagcccttggggctcaaattagggaaaaaacaccatacaatagcttatattcaaaatgtgcagattaatttgtgtgtgtgcgtggcagtgggagggggatgcatttttctgttctgtacccactgtatttgttcgggtataatggtttgaagccaagcatttaagacctataatgcagattttcctgttttaattaacagcatgtgttcatgccactgtaataaaaataacatcaagtctaaatcacactgaccatccaacctgtgaatacaagtttttttatcttaaaaaaattaaacatgaaactttaccatggcaaaggaactacaattgtaagagctgctgaaagaacagataatgatgagacataaaggagcaaccaaaatatagttaagttttgttaaggatggcaaaagatcttcgaatgctcttatgcattaactctatatagaaaatagtatattggccaggcacagaggctcatgcctgtaatcccaacactttgagaggccgaggtggggggatcgcttgaagcccagagtttgagaactacatgggcaacatagtaagaacctgtctctccaaaaatttttttgtaaaaaataagctaagcatagtagcacacacctgtagtcccagctacacagaaggctgaggcaggagcattactcgagcccaggagttcaagactgcagtgagccatgattgcgccactgcactccagcctgggtggaagagactatctctcaaaaacaaagaaaagaaaaatcatgtcctaaatcatgtttggaggtttgaaaaaatcaacttggaaaaaaagtaaaccaacttctgatgatctgcccaggccagcagaggtcatcaggagctacctaacatcatctgtttcatgtccttcaagctatcttaaaatgattctctaaaaagcactgccagaaaatagtcttctgcccagctcccacataaaaacagaggtagtttcacaaaccacaaaaagggaaccagcaaaaacacttctgtacacagcttctctacaagtcagcatgccttttatccaacatcacacagtgtgcgcctgacactctctactataaactgtatctgttctccaactccaaagacagtgcagcagggttttttttttcttttttttctttttttttctttttttttgttccatggggtcgtctttatccccaaaccacatctgtcttgagtttctctcagattagtcaggtggatcagtgctccccagggcctgctccagctgaagtattttaatttgactaaacacctgatttattttatctctccgatgagaaaggcagtttgtcttaatagagcctgtcagcccacagccccattcacagcaatttacaggcagccagggacgctggaagagaagagtgccgtgattctgtattttatcctcctccagaaagcacctaaaagcagctattcactgctactgcatgtggcattttagaactgaattagctttttattcaagtaactacacttgttgtgaatagcttatctgtaaaattgctacattcactactgattttattaacctttggctctatcacaaaatggtcttcagttaggaaagacctttaaaattgacacatttttttttcttaggggcctttattccagtgacttcagatttactgaatttgatccattgaattctttaccagttgtacttaaaattttgagtctcaataggaagtcaataatgcgtaaataaggaaacacttttcaaaatataaatatgatgacaatttcccccatcaaaagttttcaaataccatctttcattataacagtttcaaaatcagccctctagccttttttggtcacaatctgaagaacttgaaaaaaaataactgaaatgtactattttttttttaactttacaaactattactacctgtccccaggcccaaagccacagagaagattcaaaacagatgagaatttaggtaaaatgagataaataaggcaattctcttattgatatagcatgaaaaattaaaataaaaaattaagtttaaaatgtatttaaaagcctttttttacatcagttcacaaaagttagcactacagtctgctaattttgcccttatgaaatatatataatcaaaatcagtggtgctagaaataagactggtcattgggaagtcactgaagaccagatctggataaggcaggcaacttgcagggcactttactaaatggagatttacctcacctcttccacagtattcccatacctagaacttttacaatataaaaatcttaaacaggtcattcattaaatagatattctctgaaagggagtcaccactatgtgatgacaactaagtttttctaatgagaaaatctagaaacaacacagcaacggagaaagagaaaaagagttaagagaggaaaagagagaaaatgagtacgagaacagctaaattaaattttgtgcatttctccacatcctttctatctctaataaaatgggctaggcatggtggctcacaattgcaatcctagcaatttgggaggctaaggtggcagcatctcttgagaccaggaggttgatgctgcagtgagctatgattgcatcgctgcaccccagtctgggcgacagggtgagatcctgtctttaaaaaaaaaataaaaataaatgaagggcaatggtgttaacataccaagccaaataaaattaatagtcaactaatggcattctctagaaacatgtcccagggaatttaaaatgagatttaaacctagacattctcctgtattagatcaatgcacacattaataaacttaatcggacttaatgaaattataagaaacctgggtaactaacaaatgtctgtgtttagagtagtgggtaggggtggcactgacactggagtggagttctgatgaagatacactttttcacataaatcctagaaagattaaagcacttaacagtaattccaaagcaacatcaatcaaggaactcagccaacaatccagaaagattgtaaattaagttgaaaacaaaagctcttaagaatcaattccctggtcagttctaatttttttaatggatatcgttttagaagaaagccaaaataacaatgctagtcataaaagaaagctgcattgctcttttctacccacagataacctgggaaaactgctgcatctttacactgcagcctcctcacacatctgatggactgtgatgtctccacttcacaagctcagtccatcatttagcattggccgttttggatacagccttcttttaaatgtcacaaaacatagcaacaaaaagtcaacaaaaaataaacagggtaagctgaagagactaacaatctatcagaaggtcccctgataaaagttactttgtggtgactgcctgagaaaggaacccctgtcccagcataccagcagctaatttgagttctgaatccaatagcagttttaaaagctttccacactaaatggccctagtgcatcataaagataaaggatttcagtacaaaaccaccacaaagacctctattatcttatcagtctttggttacaacagctgaaccaatatgactaaattctgaatgacttttttcaaaacagcagaatactggaatttctttgttttctcatcagtcagctattgtcattgctcccatatgctactgtccattcctcagtaaataaaaagtttaataaatgcagcaattgtgctcttaggaatcacttagggaccacttcacaggaagtgtgcctcatgagttgaggtataggctgtttgttactgttgttgttgttttctttttcactgaatgtatgagaatttccttcttgatattcacctttaaaatgtcattagaatctacagtgtactaacaaggcaaaaatacccaggtatttcctaaattaagatcaaactctcctataccaggcacactcaagtctcctacttcccctcttcctggctgcaaaaggaagtctattcctggatcaactgaggtctattcatgtcgcaaatcctaacagagcaagaacaatccatggaatcctgccatctaggctcccaacctcacagctgggcttttagcccattgtgctttataagcccatcctttttggatctggaaacgaaggtattctgaaacttctctccttcaatataagacagactgtctttacattactgttctctgtgggtgactgccagtcactggctacatctccataacctacacataaaaatagtaatttctggcctttcagaaacatgaaattcttttgtcctttaaaggggaaaaacaattaaatcatttgtgtcaatatcaccaccaagtattgcaggattggctctttctctagaagctccatgagcgttaggagaggaagggaaggagtaagaaaaatagactttattaacaaggcattttcttaaaaattcttgttatcttaatcctcatccaaaaagttacattgttattttcatttcacagatgaaaaactaagctattgagacagaaagtaatttgaccaagtcatagagcatttaattgaatttgaattcacatcttctgatttttaatccaagcgagtctagagtctaagaaagaggtatcttccctcatctcacacttagaatacatagttagggaatttctaaaagttaggagcaatgttctgaggtaccaagaatcctaatgctatttacagctaagagatatacaactaaaaggaatgaagaaatgtacaacttctcagttaaggctttgtttacaaaataaggcaaaaagcttggctagcaatcagacaaccaaagaggtcaataaattgaactttgacatcttatggatgtgaaaacagatcttgacattaagtgacatgtctgaattactctagaaattagcagcaagcctggcagaccagattctctgtatgcttattccccaacccttctcttcccaaatagcatatggcttcctggtttcaggcccaaatacagtaattatgcagactccgacattctctggcattctccggcattctccagcattccagatacaatatttacaacacccatgaaagtatgagaaatacactcaaatatttgcaggagtccagtgtcctgctgccccgggtgcagtgtatatgtaggctgaggctgtcaggttctagccaagagaaaggtatgtggagaagtctaggaagtgagtctagcatgatttgagaaacctcccagatacaactaaggcttgggacagttgcccatacaaacataccacatactgtgcccatttctagggtgtatttacaatttgcctagaggaaatcaagggaatctctgctctagcccactatgccccttcatacaataataatagcttaaacttatactacaattgctttgcactgggaaaagctttatatattaagtcatctattcctcacaacagtcctatgaagtaggtcatattgttacctccactttaaagacaaggaaactgaagcatgcaaaagtaacgcagcttgcccaaatccttagctattaaatcatatatctgagattcaaaatcagaaagtctggcaacagattctgtcctcttaaccactatgataaatggagaatggaactcctgaatgtcctaccttctcaaaattactttacccaacagacaatgtagctgagattttccttataatctatttttaaggatgttttattttgttggaatataatatttcctaaatatactgtttactaaagtgaaagcacttatctagggaattatctatgacactctattttctttaaaatatcccagcgactagtacaatgtcctgtgacctttcagtccaagtcacaaatatccaacacagcttgtagtcatctaatttactctcctcttccatactcactgtcatactctttttttttcttactctgatcttgttccctccaagttcactggtgctcagacttctaccttgattcctaattttcattccactggacctctggacttggactctcaaatggtagaaatttggcttccccaacagactgatttgactggtcctctgtcttcttcttcttcttctttttttttttttttttttttgagatggagtctcactctgttacccaggctggagtgcagtggtgtgatctcggctcactgcagcctccacctcctgggttcaagtgattctcctgcctcagcctcccaagtagctggaactacaggtgcctgccaccacgcctggctaatttttgtatatttagtagagatggggtttcaccatgtttcacaggctggtcttgaactcctgacctcaggtgatctgcccaccttgtcctcccaaagtggtgggattacaggcgggagccaccacgcccaacatcctctggctttttagtgccccattttggctcctctacgaattccccattccaggtctgtcatgaaacacatccctgcccccaaatcatttgatcagcaaactagagagtccagttcagtcatgttttttctgtgttgtctgtagctctcaggacatcctagtgggtgtggctgttgcaactactgagactttaatgaaaacaggcgcttaaaaaaaccttcaattccaatgaaactgaccgacaagggagattatgtttttatataatcatagatagctcatagtttcctgaattacagtgctgagtatatatgatcaggtaacaggcaagtaacacagatcccacctatcacaaactcatattgtgagtctatagagggaaaatggaactggaaatttcatattgattctaaaaactgctgtttcttttattgttcttttatagttaaatatagctggataaatagcatgttcttttcattcacaatgttgaccttaataatgattcctgggtaaaataggtgctgccaaatatatctcatcagtgtattatgaaaataaaacttctttcaagattatctaatgtttcctatgtagcattcacaatattcagggcacagaaaataatggaatgtcaaagagaagaaaagacagttaaagcctgggtccagaaatgaccaagagtctcctgtcacaggattattttgaacatgctaaagtagaacatgaataaaattctaaaaagaaatttctaagcctctacttataaaaattaaaagttaatatacatttgttcaacctataaaaaataatttgtcacaaataggatgtcctattctcacactaggacattcgtcacaaattcttagaaaagcttaattcaagatttcctgttgttgttgttgttgttgttgttgttgttgttgttgttgttttgagatggcgttttgcacttcttgcccaagctggagtgcagtggctcgatcttggctcactgcagcctccacctccccagctcaagcaattctcctgcatcagcctcccgagtagctgggattacaggcgcctgccaccacgccctgctaatttttttttctttttttttttttttttgtatttttagtagagatggggtttcaccatgttggccaggctgggctcaaactcctggcctcaggtgatccacccaccttggcctcccaaagtgccagccaattcaagatttttaaagatttaaaatcactttatgcaataattgtagattataaattgagtttaagaagaagcttataaaactcactttctaacgtaactttaaaatgctcatggtttttcaactttcagatcaataaaaataagggtttttaaattttttagcttgaaagcaaaaactggatatgtaatcctgagacaagaaggaaaaaatacgttaaattatgagcctcataaggaatataataccacaactggtagtacttaaaaacaacctcagcagtggtggacatcaccttttgaagaggcaaacatctgaaaaggcgatgagattatcacaaaacttgaatttaaacgtaatactttaaaagatcattgcttgtaaaaaaattattatagcatcaatggtcccagaaggattgtagagggagcaaatacagatctcaaggatgttttccctactacactctctttgctccctacccaagttcaaagcctttgctgtgaattaggtaagaatctactctagtgctactcataattctaccgagaaaactggtggagaggaagaacaaatgataagccacaatgtatacttcctacgtgtcagctccttaaggggaggatctgtgtcacatgcatctctgtgacaaggcacaaacatgactacatgtctactactgattttgtgctcagtaaatttgaaatgaactaataaccaactctaaataattagttctcagaatagttggtgatagacggccaaagaaattaacaaaccagaaagaattgctttgaactacaggagtatctgagccatatctgagttaattctagtttggtaaccattgtaactaactgaactcaccagccatccccactgttgcacaagtggtagaaaatcaaatctaagagaagacaagagataaagaatttgaactaaaaaacattcaataaacacttttttttagcacaaatgatcgtccaaacactttctatgtgctaggattagcatttcgcattttttctctactgcaacaaacttgggaaaatgatgctgaggaaggttaaaaatatgtccaagatcacacagcttgttagcttgtaatcaatagagctatgattcctaagccagttggtctgaatacccaaccccagcctcttttcagtaaactataaatgtttctggaaaaaagagaaattttaaaaaaagttaactagtttaagacaatgacttcacatagccttcaagccttcttcctgcattttaaaacattaaagtacgctgttgggagatacagtgatattaaaaggcacactaatttatatttaggataattacaatttaatgttatttaaggtccgtgaacagtaaaagaagtctgatggctcagggaactagtctccatcaacagacttgaaaattctgtattcagaaaatattacatctagaaattcaatttttaattgtgtgaaaaattcaaacagttctagtaacataaactataatttagaaggcagaatcaactacaggaccaaataaattatacaaactaagcaattttacaggaaaaatttcacaagaatttatattattatattaactctttctaacatcaccttcttccagtaaaattaaattatatgtcaatacactggtatcagaaaacaggttctaattcttaattgcccaaagaaatgactgtccatggagtcacagatgattgataaattaattcaccttccataatgccaccaaagcttttgtaggagaatgttttcagaagttatactttagataaaaaacaagccattctttagttgaatctcaaaagttggaagaatgaccctgtgtcactattagttggtccagatatcaggtttctcagttcttaaatctgcctcctactcagtcttctcactctgtattttgtacacccttactagccaagaagattttggctagctgactcactttctacagtttaagaaatttataggcatattgaatacatttttacaagctatcagcaaccccatttgagaatcctgttctacttctcaaaaacagttttaattaaatgggtatttgtagctagtttcttttatacttaaggtttaaaacagagttgaaagtttttaaagtgctcattgactttctaaaaacaatgcattctttccatcatactgacacatctatagaatatctcttaatctctttctaaaatgtaaataggatcctgtctaaatgtttaaagtgttgtgattccaaaagtactcaattatcatgcactgatgaaaaaactgttatgttctttgacaaagaaaatctacttgatcacctttttggcaacaataatatataaaatcttctaaattacttgattacatcatttttatattagtttgtttactattagctggttctccaaacctataacagttccagacatatagtaggtcttaaaaaaaatacaggctgggcgcgatggctcctgcctgtaatcccagcactttgggaggctgaggcaggtggatcacctgagatcaggagtttgagaccagcctggccaacatgttgaaactctgtctctactaaaaatatatacatatatataaaactagccaggcatggtggtgggcacctgtaatcccagctactagggaggctgaggcaggagaattgcttgaacccaggagacggaggttgcagtgagctgacacggtgccatgcactccaacctcggtgacagagtgagactccgtctcaaaaaaaaaaaaaaaatccctttaaggattccatcatgtgaagtcattcataaaatacatcatccaacctacgacattttaaatgaaaggaggtgctgttaattattatgtcaagaacacaggtatagaaaccaggacaataccaggtaagccaggatatatgaatacacaatcacaacttgttctcatttaatgtcagtttctgacaaggtaatattacataaatagaaccctatagttgatttttaaatgtcataaaaatttcctggaataaatttatgtagctggcaagctgaaatatgaatggcactattctttagaataattaggctcaattcatcactatttaaaatatgtagaaactcataataaacaaatatataaatgtatatattatatattctatatatagatagatataactcattaaagtaaacctaacaatgtataggttctaataatcttggtttcataaagtttgttcaaatgctccttatttgcaaagtatttttttttttttctttttttttttttttgagacggagtctcgctctgtcgcccaggctggagtgcagtggcgggatctcggctcactgcaagctccgcctcccgggttcacgccattctcctgcctcagcctcccaagtagctgggactacaggcgcccgccactacgcccggctaattttttgtatttttagtagagacggggtttcaccgttttagccgggatggtctcgatctcctgacctcgtgatccgcccgcctcggcctcccaaagtgctgggattacaggcgtgagccaccgcgcccggcctgcaaagtatttttaagagagatttttaatttaaaattcatagaaataataaatttatttttcatgaaaagtgactcccaattaaggatatatgaagatcattccgatttttcccattttagaagtgaaaaacttatactttcactactaattaactaaataacagaaaaatgcccatgtaaaaaatgagagtattaaaatatctaaattttacagcactattatgaattttaatttttatattaagcacatgttcaactcttatacgatgaaaatacacacaaagaaaacataaaccaatgaaaaattttcatttgcttctgaagattctaaggccatgttattaatatacacatagtgaagacataatgaattttattgtaaaggaagactagtagaatgtcctgtgtagcataaaaatcgtaaagcaaaaactttcccacattattttaagcagaaaactcaaccaaatttctgaaatctagataagacttccaattcaacaaaagccatggaacaaatggctgctgaataaattccacgaaaaaaagtatttttccccattcaacaagatagtattagaaaatctacagcctacaattattcaagagattttataattaagtttctagaaaattactagcaatgtggtttaaccaatttctcactaacattaaaaaataattccccaatcatatgagcaggaacacaaaagacaaccacctatctctccagaactgaactacacttgagttctaaaattttcaagcttatacctagtcagttctaactagaagtttccaagaatggcttttaaaaaaagaaggaattggaaggctataaatgaaatataattactaacctaacacagaaataaatgtatttaatatagctaactactaaagactactcgtaattttaaaaccaatgaatctaaaccagatgaagataaaaaggcactgtgaaaacaagcaaacaccaaaatacatagaaaatctatgacatgactgggaaaaaaaagattctgccattcgtggatgtttcaagcactgctttataggaatctctgagtaaagttgtaactgttagtaaatactaataaaagccacagaaaaggtagtacaatcagggtttcaaagaaaggagaaaaatctgaaatactaaagtgagcatcaattaggaattctgaggaccacaaaaatccaaaggcaagtgattaaatcactacaacccaatgtaactgaatataggtttggtgcccttcaggtttcttttctttggaaccaaattcagttaaacaataactgttaccatttttataaaaatttagctttctgacatttttctttaagcaaagagtgaattaacaaactcatggcagggaaaaaaaaggaaggagaaaaagtaactcaagcattacagcactcttctacatggcaaggagatgaatgaaacaaacaagactctcccaagaagattcatattgcaagtaagagtttttggccaatatatttcttgtaggtaatatactttgaattcagacaaaacactttcaaggtttaattatcaacacaacaaaccaaagacaagagttcccaaacatcagacatggttatatcaaacataaacgcttaaatccattcatgagctaaatataaacatctgaagtagctactgttggagttatctgtgcaactaagagcacaggtaatcaagaattgcctacatatacacttttgttccctccattggttcaaattaattgagcaatcaagagcagcttagaacacttagagtcaagaagaattctctttgtcaacccaaataattataaggcagagatcatcagcaatagtgaggtgatactattgttactatcattcatgttattatcattataaagtaaaaaaccatggtagaaattctaccggcattgcaactctaccaagataaaaatacaaagtaagtaattttcagtatgaagcttctcatcttaacctattttctctgaattagtaaagtgaaaaaaaatatcaaaaaatggacttagcctaaaaccttatatcaaaaagtttacgtgaggcaatgcacatgttaattaactagatttagtcaatccacaatgtatacatacttcaaaacatcatattgtacacaagagatacatacaattttattgtcaattaaaaaaaaaacaccactttttaagtagctgttatcaccaccaccaatttacatatgatgaaacatacaaagaggatacatgattgacccaaaatttaaactctaacttaaaacctatttccctttccacttcaaaacatccaattcttctaggctaatatctgagaataaattttcgtatctctaaatttcatggttctcattagtactaaagcaacagtgtgcttattttcccaacctagagtcccagattgatcctataaactgaagaactggagacctggaggaagggagaggacatgtgggggtgtggtgtgtgtagtatgcctggtatgtgtatatctatacagttccaaaagtgttttccaatttgaacttcaacaattgttacaaaggtcactgcatagctgagctttttagcggggaagagaaacattaagaaagaaaaagaaagaaagaaaaaaaacaactttactttccccaatcagcccagcttatttgttctctactatatttctgacccctggttcaaccgtgattaatctatatctggaggtgattttttaaaaaatctatcttatctattaaaaactaaattgaattgtctttttaagagtacacttattcaaacaattacacactcaggaaatcaatgttgtaaagagtcaaagagatcattcaacccccaagtttgacaaataagaaagctgaaagccagaggggaaagtgacatgcctgatgtcagatagctaattagctagtgacagagttaggactagaacctagaagtcctaattctcagttcagaactccttctgctataacatgcttcctctttttaaaaaaaaatcaagggaaataatgcactttaaatctctcttggtagatagttgattttcgttatcattttcctcagttcacttaagaagcaacattggttcttaattcagcactttaattttccatgtctaacatgtaatttaacaatgaaatgctcatctaatagcagaagcaatttataggaaagtattttgtgagacacaacttgtctaatgatactaagaattccacgatagaaccagcatatgagttttcatatgtgctagttaagggaggagattaaccatagtttaaatgatatttttttcagaaatagcaaattgagatcttctatagggaaaacagttacatatgggctttgaaagacttcaatgcccatcactgatcaaatttaaccactgacatatgggccacaagaatccttgcatttcatttgcccatgtatttgaaaacttgagtgctcaagggattccccagatcctaatttccttttaataagagtaagagcttatgtaaaatatggtagtctaagttctttggaaacaaggtatcaaaataacaagaaattataattttaaaaaatcagtgccatactgggagtgtagaaaaatagaaatgcagagttatgaagatttaacagccaaaatgaggccagataaatcacgtaagtatatagttattaagcatttgttggtatatagaaaatgacagagaagtagaaaaaaattaaactcaaaaaatagtactatgctcatcttacaatttataagttgtttaataagagctattaaagtacataaaatatttcattaactatgaagttacagagtggaaggtttctggaatgtaagtcaggagatctgggttctagtttcaattttgccaccttgtacaagtaattctctgggcttccatttacctgcctgtaatatgagaggttgaactaggtaacctataaggatacttctagtttgggttacaatgctagaaatagtcctttagtgtgggctctctgcaatattaaaaatgtatggaagtaattcaatttttactatgcctgtaaagatcattaatattttggtagcattagaaaaaaaaaacacttatgttactgagaatggcaaatgtatgtatgttgtatatatacacacatatacacatttattaggttaatattatgtgttaatgtacaactagcattaacttttcagatgcgatatttttgttaattttaagagtattctgcattataaaggtcaatttcttttacattataactaatgtcagtttggccaacaaactcactaattcacaaaatacatttttatctctttatatttacaaaagacctctgttggaataaaaacagaatacagaaggtgaacttacatcattctgtatatgaggaaatataacttttaattctttgatttgttacagtttcatatgtaaatttagtgagttttgtttgcatattgtaataataatcagactgaggaagaagtatggtgaagtgtttaagagcttgggttctggagtcagattccccagtttaaaatctttgctatgccacttcctagaacagtaactttggtctcgttttatcttgtgtaaaattggaatagtgatagagtattgtatagatcaagtgagttaacgcaagttaatacatgtgaagcacttagaacagttgccttcacatagtgagcactcaataaatacttgccattatgatcatataatgtctatattaaaatctattttagagtcttaagaatgaagaacaaaagtagcgtaatatagaaatattatgatttattttatcctgtttaataaatttacataatcacagacactttcattgactagaaagtgtcactttatcccaacctctggaaagttggaaattcaggcatggtagatatgatcatgtcactctctgagtttaaactcttcaaaggctctcaactaataaagtccagactttccaacatgatatacatagcacttcatgattttgccattacttgcccatctcgcctcatctaacttttgacatccaaatttagcacacaccgacccctactacaaatgcacatacacatataccactattttcactgaaaacataaaaatctccagaaaagtcatttctctctcatgctgctgtgtcttacccactctattcacactgcccaaaacactcttctacccatctttccaactgttagtactattttaaaagtgagaaattaagaagaaaccaaatgcttatcaatagaagaatgtataaacaaagtattatttattgatagctaggaatattatgcagacagccctcaaactgatgaaaagaacaaattcggctgggcgcggtggctcacgcctgtaatcctagcactttgggaagccgaggtgggcggatcatgaggtcaggagatcgagaccatcctggctaacacggtgaaaccccatcaaaatacaaaaaattagccaggcatggtggcgggcacctgtagtcccagctactcgggaggctgaggcaggagaatggcctgaacctgggaggcagagcttgcagtgagccgagatcgcaccactgcacccaccttgggcgacagagcgagactccatctcaaaaaaaaaaaaaaagtaaagaacaaattcatttatttaacaaatatttattgaggacattttatgtgctgttctagattttacaggttagtgaacaaaataaacaaaaattttatccccaagaatgaggtatagtttgtactgttttttgaaaaaaaagaaagttgcatagcacatttgtatttttaaaaatataattttttaaaactaaaatatgcataggaatgtgttgcataaacaacaagtatcaacagtgattgtctgtgggctgtgcaataaggccagcagagacaaaggaatgagaaaattttatttattctttatatacttctatattgatattgtataatagtctacattaataaatactaatttacaatttttgaaattattaagaagaaaatatttcttgctcaaggctaactaattaagttatttcttcccaacataaaaggattatttctactaaaggtcacttaaagaaagttgagatagaatttgaagtaagaagatatttaaagaaattaatttccttctatctgatgttttgaataattgtgtagactttttaaaaataaataaacatttaattctatgggaagagagtgcctatttccttcatcagtattacatacacatctgtcatttgaatttcataccttcaactctcatgtactccaaaaagcattttggacactatcagggtatgaatataatatagccatacacctaaattgtatgcataaaactacttttctaataatactataatcttttctgtctttttcactgtattggtattttctctaatggtgcaaaagcaatggtgagtgaaattcctggcgctttcgcacaaattaaggcagtggcactcaactgtactagtctttgaaatcagagtagactgcttttttaaaaaatagaacagcatttttacttgaaaaaatgactgacagacaaagagtggttatttagatttgaatttttaacaggtattttcccaaaaatgaaacaaagtgagcttttcacttgaaggaaaacaactaactgtatttgtttgtcagtgatagaatctgagcctccaaattagcaaatatggtattaatggatgtgatgtttttacattgcattatgaaatatgtcaacatttggaagttctatataactcagagatataacatcttccaaatgaccaatacaaaatcttacaaaagcatgcaatggtaaaagatccattcaaattgtaagtcagatcaatggattttaatatcatgtaataaaatatgaagatgctttatatttcagattccacatcatcattctacttgtaaattttgatgtagtattgaagaatatccacaaatatctcaataagctattaaaatatttcattttctaaatacatatatgtgtgggcttcatacacttcaaccaaaacaacatattgtgacagactgaatgcagaagcatacatgggaattcatctcctcttaagcctgaaatacaaaaaatttatgaaattgtaacataatgccactcttctcacaaaattgtttttgtaaaagtatgttgttttggcaataagtttattgttattttaaacaaattagtattttaaattttttctcagttttaatttctaatactagaatataagtggacaaaagctataaaaatgaaagcttttcgggggtcttcattagcttttaagacttaaaaacaacctaaaggtatgagaactgctgtgtactatgtaagtgattctgggttactagtctgactaagctctatgcaaactgagttaactggttccccaattctaagacatactagacactcaaatatgtgtgaaatgtaaatgatcctcaaaaatatttctgggcccggcagggtggctcacaccggtaatcccagcactttgggaggccgaagtgggaggatcacttgagtgcaggagttggagactagcctggataacatggcaaaaccccgtctctactaaaatacacaaattagctgggcgtggtggtgagtgcctgtccccagctactcaggaggccaagacacaagaatcgtttcagcctggaaggcggagatggtagtgagctaagctcgtaccacagcactccaacctgggtgacagcatgagactctgtctcaaaaaaaagaaaaaattatatatatttttttttctggaaaaataaatacatttttgaataaatgaaaaatgtgagttttaaatcagaactgaggtggaaaactagctccaatacttactaggcttttcagtttgggacaaattattattgctttttctgagccttagtttctccatatataaaaataagatttatagtatctattcaacagaattgctataaatgtgttttcaatattgttaataagacagtatgtggagaaagtgaaacccacatacactactggttggaatgtaaaatggtatagctgctttggaatcagtctatcagttcctccaaaggttaaacagagttactagatgacccagcaattccatctctaggtatttatacccaaaaggaataaaaacatatccacacaaaattttatacacaaatgttcatagcagcactattcataatagcaaaaaaagagaaacaacccatgttcatcaactgatgaatggtgaataaaatgtggcatatagccatagagtgtaatatcatgtggcaataaaaaggaacgaggtactgatacatgctacaacatggatgagcctggaaaacattgtgctaagttaaagaagccagtcacaaaagaccacatatataattccattcatatgaaatgtccagaataggcaaatctacagagatagaaagtagattagtggttgtttaggggtggggagttgtgacgaaatgggaagtgactgctaaaaggtaagaaatttctctgagggtgatgtacatattctaaaattgatggtggcagatgaatcttgtggtcttgcagtataaactaactagaattcccaatcaggagcagttccatataggtggagagaagtcaggatacgaagacagaataaaagcaactactccaaacagccttctctcacactcacaggcttcttaggcatctctcgcactcactacatttaaccaatcgttcaataaatataatttacctgggtcaggcagtgaaccgacacatactgttttcatgcaacttactttctagtggaggaactcagacaataaatacaagaaatgaccaattaaagggatagtaagagatagtaaacgctgtagaagaaaacagctgagtaggtggaagaggttctaattttaagcaagatagtcaaggtagttctcccaaagaagatgacttttcagcaagaatttgaaagagcttaaaacatgatccgtgggaatacttaggagtagagaattctaagaataaaaaacagatgcaaaagtcctaatgtggtgcctctttgggaagaatcagtaggtaaacacataaaaataaaaaaatttaaaaagcaaaggggagattaatagaagatgaaattaaagaggtaaaagggaaccaaccatatgtatcttgataggatgtttagggccatcataagcactctggcctttacttatattaatatgaggatacattagagggtttttgagcaatggagtaatgtgacttaactttttaaaaggttagtctggcttctgtgtggaaaacagactgtgtggagacaaaggagaaagcagggatttaagctaggaggcttttacaataatccaagcaagagagattaatggcctggaccaaggtgatagcaatggcaaatttaagctggataatttgaggagagttaaattaaaaaaaaaaactatttacaaaaatatggggcaaggtttaaggaaaacaaaaagggatagtgctgtatccaggagacagttacaggatgaagctgtcattatacccaggcttctagggtaaggtgagagaatggttcctggaatctggagaatgtagttgtatgaagagggtcatgaaaggttacaaccagtctatagcaatctggcaagaaaagagctaagaccagggagaagacactgatgccactcttctcctgttctccacagtgtctcacattggttgaacccaactggaagtcaaagagaaagggaaatcactaacatggtgcataaaagttgaactcccagagcacagagcaagtttagaaggattaagagagaagcaaatggaaaatatgtaccacagtgaaaaatcaaagttgatttccaggttttttacctgaacacctagcacagagttgccgttactgagatgagaaagattttaggtgtggtagattttggaaagaaaatcaggagttctcttttagacatattaaaagtttacagttttcaggtagaaatgtacagtagaaaataaaaaaagaacctcctccagttgactgaaggctttggtaccctcacccatcctgtgacaagaagtcagaaaaaggccaacagatacactgtaaacagatatgaggcctaggcaagttagaaaacttctcttggtgaagcagagtggcatggatagtctgagaaaagctgttagctctaataccagaagatgatgacaaatcacatttatccagcagtctcctgtgcctctgaggcagagcttgcttttatttttttaacatttaatccactaaatttagtgtttatcaattcaatgaatatttttatactattacatacatatgagtttataagaaaatatctatggtattatttttacatgttttcagtttatataaattttatcatatactagatatataattttatgtctttcatttaatattatgtttttaaattcacacgttgatatgcattgctattgtatatttgactgcttctttattttgactgctattataaacaatgctataatgaacattcttgtatatgtgcaagagtttctttaggatataaatatataactataaaagttggattgttaatgcatagagtatgtgcatcttcaactttgctagatatagctaaacttttctcaaagcagatatataaacttagaccctcacaagtagtttatgagaatctcagctcctcacacttaatttttttccaatccgatggatgcaaaatggcgtcttattttttctttaatttgcatttccctattcttcagacatcctcttctgcaaattgcctatttaattttgagcaagtttgaatctcacaagctatgtctatcacatggattttggttccatgatgttaaaggccaggtctgtctgttcaagtatcttcatgccaaagccaaaaagcagtactctgaacaaagagaattttgagttttccttgcagaagccacaaaacctaacagtggtgactctcaggagaccttgaggtcatctttgttaaaatctccctctcatcttaatcctgaacttttgtacctttggttaatttgattcctggacctcaaatctaggataaatgactctagggtggcacatggagctggatactaggaaggtgtcagagtgctaaaagtgtctcaatgttatgcccagaaagcttagctggcatgggtttagtatatcagggaaaatactagatacaaaattataaatgcaaatagttctctctttttctcttagagttttatttactttgaaaggataaatctaatatttttcttcttctttagtattttccttagcatgtctaaatctctctgtctgccgcaccctgtctttccctgtatatgtttttgcatctctctgacacctagttaaacactcaaaatctgtattaaacacaatgaagaatgcatacataaaaacatgagtattaaatacaatgaaaaataccactcaaaacaggaagctgccttgctgacagtttgatgaaggaaagatagaaggatcagctttcccattagccatcagtggagatgagaaaatttcaagtaacccacaaaagctgatatgctccaccaagcacacagtatacatgtgagaaaaatagattttaatataatttcagcatttctgtatataagttatgatccattcccacaggattttaatacatcttcctcagtgaagaaaaaagtctgtatttcttgcaacaatatacaaataagtaaaaaaaaattatgaacaccaatttcaaaactaacttcatttaatagaattcttccatcaaaatcttgttttcagaaagctcactaaatttgacataatattatttcttggcttctttaaagtatggtatcatagaaacgtcttgttatatatacctgtagattctacattttgatagcattagaactccccaaaagacttagccttttatggctattataatatagaagaacactgtccaatagagctttcttatgataatggaaatgttctacatctatgctgcctaatatgatagccataacaaggtatgttaagtaagccttaaaatgcagccaatgttactgaggaactgatgttaattttagttaatttgatttgaattgattaagtagccacatgtggctaatagcttcagtattgggcaacacaggtttagaatagtctagaaaatttttccttctatctagccataaacattagtctataactatactaagcaggtaactaggacaggacaatctcaccctagaatcaaaggtcacaacactctcaagtactatttgtagtgacctatttctcttcttctgtcagtgctgaattactgggtacttactacctagtccttctgcatcttatacgctgactcatttttaacagagcttactttttgacacttgttatctaatgcacaggtgcttgggtaactgcctttatgttcttcattctcctaacttacattcttggacctctctgatcccttagagtgactcaactgctaaaataaccattacccgctgctcctatactgtcagtgttgattgtctaaactctatttctctataaggagatgccatattcacatccccattcatgactttagccatacctaaagtatctgtctaacatatggttttaagtatactcatgggtctgatttctcttggcttccccctcaagcactggaaccaatttttttttttttttttttttgagacggagtttcgctcttttgcccaagctggagtgaagtggcaccatctcggctcactgcaacctccgccccctgggttcaagcaattctcctgcctcagcctcctgagtagccgggatgacaggcacacaccaccacacccagctaatttttgtatttttagtagatacggggttttaccatgttgatccggctggcctcgaactcctgatctcatgatcagctgacctcggcctcccaaagtgctgggattacaggcgtgagccatcgcgcccagcctagaactttttaagtagaacctgtttaagataatttgatgacttaatcctcaaaataataatgtcctctatatattcccaaattcaaaacacttgtcatttcatgagtactagctatttcatcatcatgatgagcaaaagagaacaaagctgactccctaaaatatcttcaggaataccggaaaattatggtacgaatagaaagatgtcaagacaatcaagcaattaatagatttcagggtgagataaaggctatgggaatagtagtaaggagtcattataagagagatgacaatcttcctttaactatttctcaaagttttaatttaataattaaccacaccacaatttgttattaaagttctattcatgattcataagtttttgcagtaaacacagaaatacatatgccactatgctaacaatgtaagaatcccagaagtctagccagcatccagtttccaaagcttatattctataattactctcatgacttatctaggcaccctgtcaactgtctaatagccagagatgattcactgttgcgttgtagatcacattatcctagaaagccagaataatatgaaataatccttgacagcaaattagaaaagccatgctatactaaaggagaagatcctcaaacctgaaaaatttaaattaaaagggaaaatttacaggggaaatttgaaaagaaaaattataggctttttctgtaattctagtcccacaattctcaaaaaaagaagtaaatttcacagttaagaatatgacattctcatatagaggatgatcactgtttttgttgtttgattttggttttgtttttctgtttgtttaggtcaaagagtagtatgaaagatttgaaaagtgcacgaggaaatgtgttccaataatgtctagagtagatgttagtatgccttggtgacaagggcaggagctttagcatcatatagtcctcaattcaaatcctggtttagccactattttgctgtcttgaacaaaattatgtcattgttctgagcctctgttcactcttttggaaatggaggacaatgatgcccatctcatggcactggtttgaggattaagtgagataaaatacacaaaatcactgtgatacaaagtatttgcccaaaaaatgttagtccttgtttttgtcagcgctttctctctcacttcttggtaggactttaaaaataggaatttctcatgtctgaatggtagaaaatatgaaattacataaaccccacataacctaacacaatgatgggcaaataataagcactttaaaaagatttgtggagtgactgagattctacaaatgcattccttctcgaaaagaaggatggatgagatgaattctcaagatcccttcctggttctgagattaatgttccaaccaaaaagcttttcttagtgtcaaccacaataagaatcagttcatcagcagagaggaaagggcattttttgtggtcctacttccagttttctttatgaaatataatacagagagtctcttcagaacccttcctgcactcttaagcaaattcttcttttcagactaaaaaaaaaaaaaaatcataactcttccctctagtatttcatgtcatctcattcaatcatcacttcttattcattttttcttcattattaattctaattccatcacaaatgagtctttgtaaatactcaaaaaatggcccaggtacagagagccatgtcagatagtggtgattcccctcttcttcttcctaatatcaaaactgaatagtacacagaaagagacttgggaaagtaacaagtattccagtaaaatgcttctcaacatccatctgggagggcaacagtaaaccatgatagccatggctgagaaattcacagtcaactgtgagggttagagaacagccatcatgctttgaggcaaatgcctactggcacaaaactatgattggaaaaacaaaagagctcctttcagtaaccggttaacaagaaatccagaatgctcaatggatgtgaaagcctgtatttaagcaaaaccacagcatggtcgtgcccatttcattttctttagctttcttaataaacttctatttatgctcccttgatgttacggacataaacttcagggtctcagtaggttttcccacatattagactagaaaaatttctagccctatacacttacgtaaagcactctttgtatactttactgtctcttgacatcctgcaacctgagcacaacagctacgtgtttgaacagtagaggtggttttactaacttgagtaaaaatgtgttcctgggtccagataaaactaaagtttctttataaagagttatataagttagaaattgctgtcgatgaatatcaaagtagtaaaaacctacctatttataatatggtcagaggtatatctcaatgtacttctaaaataaaaaataaagtaaaatcttcatttaaaaaggatgattatgagccaatattaaaaatgtcttaacagtcataaagatgtacagaagatttcttttacaatcacactcctataagtaaccatatagtttctagccaactttaaaatcagactgtttccaatagaaggctaacattttatttctaataatctctacttctgagtctatttgaagagtatagtcaaagacaggagccatgtgcatatgtacagtttcaagtcgatctatactcctgccctaattcttgtggcttgaacccattccagatgctctgccttactctgtggtttgtatttgaggtcccctctcctgattcattgcattcccatgattgacaaacagattcagctatgaaaataaacagttacctgcctgtaattggtttataacagctgcactgctgtagcacttctaaaacatggtgaagtcgcctcctagataagtttcctgttcacttcagtagggggttagcgggtgttgattttatgtttgcttcttaccatgaagaatttcttattgttcatcaatatattcagtacatatgatctatatacattttatggaccaaaatacattatttttattatttttaacccccgcaaattaaatttaaataagcacagactggattttaattttctaaactgatgtgcctttttaaattgaatacagaatagtcttcaaatggaaagggccacttttttttactgaattaatgtgaaacatactaccactttattgctagattaaaatgttagactagaagaaataacctagtagtttgtctcataatatcaattgaattatatgaaatgcatcaaactagttacaatacaagctactacttacatactacaaacaattgcaactctctctgcacatcagaataagagattagaacttaacattttaaaattcctgtggaaatcaaatgtattttaagtatcagctctgattatttaatcagacaacttgcattttgccctggctaattttgaaggctgataatattttactcataaaaataattgtgcacctgttgtgatggaagcctagttaaacaaatgttaataggaatgtaactctttgctttaagcataagaacacaagtctctcattactattatatgaaaaaacatattttaaagctatgaaaaatatctcattttaaatctcccctctttcatggagagatatttaagaatattattaaaacatgtataaaaatagtcgcacattaacttgaaagaaaactaacactggtgatgtcgaccgaacaaaatggatgtggagttcctcctttcatttaatacttgggtttttctaccttactctattccctggccaaaccattttcatgatattgaatcatttccgtgaaacatgtacttttcttaccagttcatgatcaaaggagaaaataaaaagtgggtttacaaaagctgtacccctcttgcactcttcttattttcagaacctttcagcattagggatctttttcagtacccaaattctctgagctttaaaaacgtgctaggcactcatggaagagagagtcttagacctttactcggttatttctatcattttgtatagactttctaagagctaccaacttgtgtctcctcagtccatttccaggtataatcaaatcctaagtgctgaaaagaggcttgaggaaaaataatttgtctgaagttaaattagctaaattttgagctcagttgtattcatctcttattgacttccataaggaagttgccttgcaattggctcagcgtttttaaggttatatttaaaaggtaattttatttaaaatcacctaaattttggaaccctatcctttactatgtcaggcccattctaattttatcttggttagtgcaatagaagtttactagcagagtacacgaatgagtgcattttttaaatgacctaaattctctgtagttttctttttcagtattttaatgcagacatttggattgaaagggaatcacaagtaaacggaataattgctcaaatttcctcagtgcattaaatatgcactcagtagtaattactaacagtagcaacacatttaaaaatgtagagaataatgtacaatttatgcttatttcaaggcccttattcataaaaataccatttggatgaaaatacacatattttattaagtggttagcccagtaattttttaaaattcagacaaatgacctaaatactaagtatgtaggaggtctagtactatgggccagttcctaatgcgacatagctatcccttgagactttggttaagaacagactctaaactaaagatatacccagagcacatcctagtacctagggtgctaggcacagagcattcctgggcctataaatagcatggagatggagattaattatgatcccatgcatttttctttcaaaaaccagctatgtataaatattatcacaaatgtccattttaaaactatatgtttattcaaacataaaaggctaaagtgaaataaagcaaattaataatagtaaaatcttttaaaatgtttttcataattttgtgttcactaattcacattataaaaatctcattgtaacttttaaaataaatgtgtatatatattaaaatctcactatcacagttacactaaaaatatccatattaactgtgtgttcagaaatattacatgtgaataacccattttaacaggaagccctctaagttttagctaccactataataaaataccagaagcaaaattatatagaaaacaacattttaggtaaaataatttggcctgtacttaaaccagatgatttaataatactgcaaggggttgagaggcatataatagctaaactacctgttacaagacgggaatgaagctgaataggctagtatttaccaggcctagattattcaaaaatgttttaattatcaataaattgaatatcatttttggttgagcaaacgttggtgacatgaactacgctgtaaacttgacatttatgattataccaatttctggggcttccttgcaatattatacatgtttaatcgtttcccatgagataatttgtgatacaagaggtaatgacagttccaggtccctattggtggcacatatccaaattctcttgttcctattcctactggaaaactatttaccaagaatctatcttgtcagtcactttacaactacctgtctaatcttcacattaatcctgaaatgcatggttgttgttgttgttgttttttaaccacttttcaggttagcaagttgagagtaaaataggttaaataaacagatcaatttatacctatcatgaatcaaacccacatgtgatcaactccacagttcatgtttattatgtcacaggcgcagatccaggggaagaaagcaactaatttctttaagccattaacttcattcagagtttcatagaatctctgaagtcttaaatgtgactaagttgctttgtagttattactgagtagttaacttattgtcaaggtaattatgtgctaatctaaggttctagtccagcagttctcaaaatgtggttcttagatccctgggaatcccagagaactattcaaggtgtccctgaaataattttcatagtttttatagtaatgctaagacattatttgcatgttacagtgatgacatttgcattgattatgcaaataaaatagtgagtaaaaccactggtttcttagcatgaatcaaaggaaccaaactttgtagtcattgtattcttcaccatcatacacttgtaataaaacaagtaaataaacaaaaaaactaatgtcacttaagaatgtccttgatgaaaccaataaaaattattaattttattaaatggtgacttttaagtacatatacttttaatagtctatgtgatgaaatgagaagcacttctcttacacatataagtataacagttgtttcaaggaaaaccaccacttgtgcttttattggcattggaagctgaactttatcaaagctatttgtatacagcaacactttcatttgaaataacaactaagaaaatattattattcagacctcaatatttggcaagtgaggcttgtcacttcaagaaaagtaaaagtaattgacagtattggttaaaataattcattcaagggaaaatgacagttttggaaaacttctatctgccatcaagagcatgacagtttccaaatacttttaaagacttttctgatgagattggtggtgatattaatgaatgcaattttctgatattacataatgaaatgtgtcaacataaggaaaagagttatacacaatgttacaaaatcatgcatggagtaaaagattcattcaaagttaaggttaaaccaatagattttaatataaaagtatgaaaagtccattgatagggtttcagatcctctactggacctaacttttaagaaactgccacttgccaaatttggtgaagtatcaaagaagaatattcacaatagcacgaaaaggttgtaaaatactcctctctttaactccatatcaaaatgaggtcagattgccttcatacacttcaatcaaaaatttatcaaagccgactaaatgcagaaacagatacgagtccaacatctattaacccatacattaaagagatctgaaaaatgtaaaccaatgccactcttctcactaatttgtttttgtttagctatttggttacagctatttttcataaaaatttgtttcatgttactatgcagtggtaccatgatagctcactgtagccctgaacccctgggctaaaacgatctgcctgcctcagcttctccagtagctaagactacaggcacatgtcaccacacccagctactttttttaattttttgtagagatggggtcttgctatattgcccaggctggtcttgaactcctatctgcaagcattcctcttgctttggcttcccaaagtgctgggattacaggtctgagccactgcagttggccctacgtacaaggtttaatatcataacttctaaatgaattagtaagtacttttaaattttctcgtttaatttctacagaatagatacaaacaaacacaaaccaagctttgtggggtcctcaataaaaatgtaagagtgcaaatgtctcctgtcaaaaatttgagcacttcatttctagtcattctattaaatattttcagttgcaagtactaaaatatgatgtgttgttgcctactgtagcatttattgattccctacttcatgccaccctataaagtacatattttctctctaacactctcaataaaattcagaagctaagtaggtagtaccatccattttcttttgtacaaataagaaaactaatccctttcacctttattattcagtcttttttaaaataatattttttattcaaaaagcaatgcataacgcatcgttttaaaaagtcctacagtacgaattatgcagcacaaaatttaaaaatcagccccaccctaaaccattcatttcctactgcacagtcaacgtctgttaacagtttactaaatatccttccagtaattttctaggtatatataatttactacacaaattgatgcacagaatactctcctcagtttttctctgacatttttaatagttccagagatgttaatcatcattaaaccaaccaatcattcaggtaatacagagatgctgggctaaaagtctctaaatcagtgaccccatttctcccaccacagtgcagagtaagtgagaattaagtttatgtcctcggaggcattttcatttaacactcaacttgtctcatttctttatcgagataagaaaatgctacaaaaatgggactaaatttaccaccccaaaatgttatgaaatcagcattctaagttatagaagttcttttgatttacctaaacacatttcactctcagattcatattattctgatgttaccctgtcatctctcattccactatgagtcataatccaatctataggtgtgtattaatgtatggatgtatagatgtagatatagatgttaatggctgtcttcagttctgggtttgtacattaatactgaaacaaaaattgtttgtattcaaagaatactagctactttaatagagaaaggttccccctcagcctaaatctaacacacatcatttaagctccagtatgttttcactaattccacacagggcgattacagatgtcctgctagccaccatttcctggtaagcaatctgaatggcttccaggaaattgctaatgaccttcattttacttaaaatctaggcttcaattagtaatagtttttcttctccatgttagctatgtttattttcatcatagcaattggaagaaaaaagtaaaatgtcttgtatttgtattatatcaaaacatatccttttttgtttcaatatgtcaccaaatagactaatacatatttaatataatcataattgtgtaagaatactttggatcattttactttaaaccaattttgcctcctttccctactctaggctgtagctattcctaaaattagccttttaaaaacaaaatcaatagaaatattttataattggtgactattttcacatataagaacattttataattgaaatttttgaaaccaggtatgatttttagttttacacttttaattataataattaactacaaacaataagtttcagattctttttcagtgaatataaaatatgattatgtggtcaatgtaacaataacaaagaacaattttagccagtattatatttataatcagaacctgttattaaacttcagtgttttcttttacataaacattgatttcactaattagattcaactgatcttttccccaacatattgatttcttttaatcccaacagttaacaatgattctaatgtatcataatactttagaccttaatcatatggtaggaattctttccagtagcttttgtttgagttttaattaagaagaccttgtgtctctaaccccaagtggggggaggttttaattgcttttatgtatatcacacagacttcaaaagaagtaaaagatgttgataacagagagtacaaaggagagctttgaaatgtctacattcatgcaaagtggtataattaaaaaaaactatgggtgttgctgtataatgtatatacatatttataaaactagctgctgtatgcatttgttgttagcaaaaagagtccatgggttctgcaataattactcactattgataacaaaacaatcaagagactatgtaaaatggactaaacatgctattttgggggaatattaagtttccaccttagtaatttactatatgatttagagcagtgacttttctcttctggatattgagatccttatatgaaaagtaagaagttggattacacaaaacacaaagcacctccagctctaacttttggagattctatgattctagatattactctgaagttctacaattacacagacatacacagaaaatactggcaaacattatttcattaaaactggaaaaggaaaaacatctgttgtgacaatcttttttacaagtcagtctctagatcaatatagcatttgtttaattattatagaaataacaatttatatttttaaaaatctataaaatctgaacattgatagttactgttttgatacttttttctaaagagacagcaaaaatccctaggtatgtgaactttgctattaaaaattttatcagagttgaaaagtggcagatgattaatctctaagcatttctagttttttttaagttccaccagatataacaattgctgtaaatttgtaagtagaaattcaataaaaattcattcataagcaaatatgcaaagtttacagccatagctcttgtaaaaccactctagtccttctgtgattgcctaaaacagaaaaaagtagtaactatgaattgctattcaaaaaaaaaaaaaaaacagagtattctgtagaaaaggcaatgcatggaataagcaatcaaagtacttacatatactttagggccttatgatagaaatgaacaaactaggagagagaactggattttaagatagtaacctgtgttgcagaacactaattctatgggaatgctgttagatccatcctgaccctttggtgataacagcactgcttaagttacttcaagaataacctacactatttgatcttcaaagatctatcatgcagtgaaaaaaaccatgacttttgtgtttctgtgcactcctccgaagatttatgcttgcaatcaaaactaaaaatgaaaccaggccctcagtggcacttagtagcagtgttgtaataaatttgcattttaattcagtatttgcaccaaacccaaccataatatgcttgtactatttgatgtatgcagttcctaattttacttcttttagtaaaaccctaataaagtaacagggagtaatgcttccagtctttaacagtgaactataatgatagtatttaggttctataaccaaacttttcagacatattagttgagtaactgtaataagtaacagttttcaacagtgcctttgaaaaacattgggaatcatttgtagaattttccatcaaaaagtatctgtttagtcaatttttttttctgtcagaagagactgttatttttctaagctaaagaagagtatacctacaagaacatctaccttgatccctaaatgtaaatattgaaataattaatcgtaaatgaccaaggaaagaaaacacgattttccttatttggttgctatcacataattgtgttttttttgtttttgtttttgttttttttttctctcttatcttctgtgtgtttgtcaaacacaagcacaaacagtttgtgctaactcaaacaaccaacattactgtgtccctggcacattgcccagggaggcaccttcacactaaggaggaaatgcccgacacagcacagaggagcatgtgtgcaaaacaggcaggctgactaagatgatctcagccatgaaggttagacccactcagggagacagagaatgaatcctcatgctctagacatcatgtagtatgtcaccattgcatttagaaatatctcataaataactatggcatcttcattcctttagtataactcaaacatagatacagatgggttatgggccctaccagtagttctgtcttaccctgtatccttccaccatatttcttcacccctgtctctcattcaggtaaagatcaagataaatactactacatggagaactgtattatctatatcactcctggtttgccatactgcctaatttacatagaaaagggtaaaagtggagttattttagttgtttgtgggttgcgggagggaggaacagcccataatctatctttttcttgctcccactgcagaattcaaagtctttaaagaataactactttgtattgtattaagcagagtattcagagaccaagattcaaaccctactttcacaactttctgagcgaccctgaacaagatacctaattccctcagtctcattttactcatatataaaatcagtataataatattttccacactggattgttatatgtctcaaataaaataatgttagatgtttactttgtaaacaataagatgtcttacaaaagttacttaccaaattatttattgacaggaaacagaacatattttgaaagtcagtcttctaattaagaaagtataataactgtagtattaatttgaaaggaaccttaggagatcatgaagataacattccaccagcatggggataccctgtacaacatctctgcttaaaattttccagaacccaattttcatttattttattaattcatcctttaattcattgattcattcgttcaacaaatatttattatttctgaatttttaatgttttttttttcaagacagggtctcactctgttacccagactggaatgtagtggtgcaatcacagtctcaacctcctggggtcaagcgatcttcctgccttgaccttctgagtaactgggactaaaggtgcgcctcaccaggcccaactcattcaacaaatatttattgaacatctacttatacttgaggcactctctactaatgcagtccaatcttatcaatgtcacagctataagttcttaatttccattttttattaagaacaagttccctattaccttaaccccctaaaacagcagaaaacacatattatcctcttctatccaataaaacttcaagtcaaataatatgtattaggccaaacttccctaggtctttaattactattcacactaaatgttcagaactctttactattctagtcattctgataaatactaatgtaacaatagatctcttaaaaatatgagacccaggccgggtgcagtggctcatgcctgtaattccagcactttgggaggccaaggcaggcggatcagctgaggtcatgagttcaagtccagtctcaccaacatggtgaaaccctgtctctactaaaaatacaaaaactagccaggcgtggtggcacatgcctgtaatcccagctactcaggaggctaaggcaggagaatcgcttgaacccgggaggcagaggttgcagtgagccgagactgcaccaatgcactcctgcctaggcgacagaacaagaccccatctcaaaagaaaaaaaaaaaatgagaccccaactgggacacaacacttcagatgcacccaggccaaagtaaaagtgtaaacattttattctgtatttcatttaaagttttaataataaagttattttgtaataattgtaataatattaacttggtttgaatcctgattttagatgactactattaaatttatgccaattatagcattctatcctcagtaatgctagaaaggaggctacatatgaaaaaatggtagggagttaaggagagattttctatttaagaatattatgaatggtggttaacaggggtaggagagagagaggaatagggagatgtaggtcaaagggtacaaagttgcaggtatgtaggatgaataagtctatagctctactctacaacataaaaactgaagttgataatattgtgctgcatgctgtaaatctgctaggagagtatattttaggtgcttttaccacacacacagaacaaggtaactatgtgaggtgatgcatatgttaatttgcttgactagtaatcatttcactgtatgtatgtatatcaaaacttcatgctgtccaccttacatatagacaataaaaaaagaatattaggcatgactcaggtacatactcatacaaatttctatgattcagtgtttctcagattttagcagtcttccaactcctatcaaggagttttagaaacattgctttacgttaatcagatataaaattttatgagaaaccactggttttttaagtaaaatctaaaagggaaaataataatctattatttcttaaatatgtaaaaatattaagctccctgagttgaagaatcattgcccttatccattctactgctcacacttgactctcctagcacctacccatcacatagaattttccaatggcagtgataaaggctgagttctctccctttcccagcttcattacactctaggactctaagagaatatgtgcagttaagaatgatatataaacacagatcagctagaaaataatataaatgttgaatatttagaaaataatgacagagttctaaaagcacaaacttatgggatgaataaagctatttctagaaatatattcatagccaaaagtaccattatcattaaataaaaatttgttaagtgaagtattcaagttaaaagataccaaaaaacaaacaaaagaaaaggcataagaataacaggaaaggagagataataagggtaaaagcaaaatgaattaataggcatattgaaaagcagcagaattgacaaatccaaaaactggattattgggggaggtagagcaataaatagaaaaaccactagcaagtaaaattgaagaacaaaaaagagaaaacaaatatgcaaaattaaatatgggatctataacagcaaataaatggaagaactaaaaataaaatatgtatatgaagtcaatgagatttgaaaatctcatgagatatacaattctgtaagagttttcttctctttaaaaattaattaggaaaactattttatggcaaaactgacttaaaagaaaagtagaaaatgttaaaaagaaatctccaaagaaaattctaggcctagatgttttatgagaatatttttcagaatttcaaggaataagtagttcatgttatttattcaacattttacataaccaagaaaaagaggaaaagtttttcaattcaactatgaacactgctactaaaaaattaacaaaagtaatataaacatggaaaactctaatcaatttataattacagttgtaaaaataactataacaactataatatgagcaaataaaatgatgcagtacatttaaacaagactataccacgactaatcagggtttatttcaatgacaaatttgaaaaacaaaacctaataagatattccatgaaataaaatgcaagttattttaatagaccaaactcctagtagactagaacaatatctttaaatgaaaaaggatattttaatcaagtcaatagaatatttaatatgaaatattaaaaacaattccataaattaaaaattacactgaaatatctgtattacttctctattacttaatattattcttggcattcaaggcaatgaacgtatgaagggtgggtgggagttgggtagcaaagagacatataactaccaaaaaggaagagaaaacatatctattgaaatatgactacacctaaaagtcaatagaggcaagttacaaaattaaccagcaaaattcaatagcatccctaaatataacaaaaggaaaatagaatgaaaaatatctcattcacaagagtaagcaaaaatattaaatactaagaaaacatcaaaggaaatgtgcaaatgtgcagaattattgagagacataaaataactgaataaatgactttgaatggagcaattcaatagtataaagatgtcagttcatcctaccctttcatataaatgtaatataatcttttaaaaaatcactttggaattttaattaacaacttgataaaataaattaaagataaactttaaagaagtatggaagcaccttaaagaaaaattatgagtgtagtcttgcaatacttacttttgaaggatactaaagttacagtgattaatatagcatagtactaataaaagtttagatggaaaaatcaatggaatagaaccaaaatctgataaatggttccaaatatgtaatcagagtgtaataaaagatgccatttcaagtcagaggaggtaagatggattatttaataaacagtatagatatttggttaactgcttgagaataaaattaagttatatttctagttgacattattcatcaaaacatatttaagatgtattatataggtaagtgtttaaaaatatagccaactaattggatgaaaatatagcagaatattgttcaatttcaggatgaagaagcctttctaaacaaaccccctatagaaaaaagcattaaagaagggatggaaagattgacagcaaaaccagaaaataaagcaaatgacaaaatgcaacatatatcacaaataaagtttaatactattcaaacatatattaagagttcttagaaaacactgagaactggacaagtcttttaaagaaaaaatgggcaaccaacatacatatgcagttcacaaaggaagagatatttaattgcaaattaatgtagatataacacctcattctcactaatagtcaaaaaactcattaaatcaacaatgatatgttttttcccctataaaaatggcaagaaatttttaaattaataatacttgttattcagggcaagagaataaaaacctgcagatattactggtgagagcacaaaatactacactcttcctgaagggtaactggcaatatgaatcaaaagtctttttaaaaagaacaaactctttggcccaggaatttcactttcaagaatataacctaaataaccactaataagttgataagtcttaataaaaatgttttctgttttcaaaataggtgctctttaaaccaacaaacaataaaaacaacttaaatgttgaagaaaaggcccagttacattatgaaaacctcattttatgcaatactttctgccaacaaaaataatattttagaagataactcaatctcaggaaaattcataatatatcattaagtggggaaaatagattacaaaaaaattataatgggatgattctaattttgtggggaaaattaacataagtatgcataatttaaaatggaaagaatatacaataagatacaagtagaattaaaagataatttcactacctttttgtttttttgtatgtttcttacagataaatacatatgaattttataatcagaaaaatataagagctatcaaaaatacacaatgcttgagatataatattaaatactgataacccatgattgtatgtattcctcaaagatataatttaggtcaccttaaaatttcaggaaaatgagaagtaatttaggtggataataactggcctggtttccaccagaataaaaatgtatgttgagttttggtagcagtttactcaaactatttcaatactattttaactgattttttcatttttaaattaatatattcttggtacattttctgtaaaagatattaggatgtatgaagagatgataatggagaataaataaagataaatttagtaagaatcttatattttatgcccataagaaactcagaataacacacaaatgaaagttcacatatcacaaagaatccagaaaaaaaggttaaagaatttgaaaaggctaatttttcatgtgattcacttttgtgatttatacattccaagtatccaagactagcacattttttaaattttgaattcaaaattagacttaaatataaagaaagacggaaagggggggagaaaatataccctgaagtacaaaaactccatgttgaattataacataataaaatgttagttttcacattactaagagaaagcaggaccctcatctttcatgctggaaaaagcttgcctttgtacaaaccatttctgttctcactgttataaaaaggaatgactttggaaagggaagaaaacacagaatgacgtgcaaagtagcaaacaccatgttattgcagctggatagagaatatgtcactaatgactttctttgtatccatcaataagttgagtttctttttttttccaagacagcaaatggcctttatgggtacaaaacagaagtaggggaactcaaaataatatccaatttccactggtttcgatacataattagttaatgcaatgatttattaattatttgctgggaaaaaagatgacttccttttctcttcacttgaattgaacatgacatgcctgaaaactaggaaattttctgtagtaaattcaaaataacatttacattagataattattatcaaattttcatcttaactcagatattatccatgaccaataggaagattcacctaaagttgttggataaattcagaaaactaatgtaactaagtacccaaattgttagtgcaaatcacagtgatgactgtccgtaaggattgacaaagttgatgcgtgatcatgaatttcattcataatgcaaaaataataataatacagcacttcttctccataaatgaatcagcaagagtttggttagtaggcaaaaagtataactctcaactgataaggtaacttactatctgaatggattgggatagtccacttcttaacatgtctaaaaataataatatcaatcacgtatattcaaaagtaaagatgtttattctcatctgagtcagagaccacaaaatgctaaacctgatgaaatttgagctttatcaacatgggatcgtctgtgtatattaataataaccaccaaacttaaactcatgagtactttcttaagtgccaggtactgttctaagaactatacatgtattaacttcttaatgagcctatgaaggaaatacttgtattatcctcattttatagatgaggattataaaacataaaacaggcccggtgcggtgactcacacctgtaatcctagcaatttgggaggccaagacaggcagatcacgaggtcaagagatcaagaacatcctggtcagcctggtgaaacccctctccactaaaaatacaaaaattaactgggcgtggtggtgcacgcctataggcccagctactcagggggctgaggcaggagaatcgcttgaacctgggaggcagaggttgcagtgagctgagatcacgccactgcactccagcctggcaacagagtgagactgcatctcaaaaaaaaaaaaaaaagaaaagaaaagaaagaaaaagaaaaaaagaaaacttcagtggcttgtccaaagttactctgtccagtgacagagccaggatttgaaccaacgtaaacaagcttcagaatcccccaataaaccattatgtacagcacattctataaacatttttaaaggtgctacaggcaacccattttgattagaagaaattcaaaataatttggattcataaattaagctattattataattttaagagggaaaactaagactatctttagcttaatttgctcatcttttaacataaggtttttatacttttttgtgaagtaaattaatgaggcagcatatcctataagttatatgtttatagactaatacaaaaagtggggaaatttttcagtttgtaaacattgcaaggaataaaagctcagaaacctataatattcaccctctcatgtacaatcaaatgttacatgtaagatttactgttacagtacagaagatcagcaaatacattgttatacaaaataacatcacatcactgcattgacatgttcgatatattttatgttgtacctttaatttctccaagaagttcactggtatttagtctttccattttttccttccaatcttttgaaagtagtttttccatgcaggaggaatctattaaaatacaaaagtaagtattaaaaatatatatttattacaaatttagaaagtcagtttatggggaaattctcatttaagaatgcataaagctgtttttgttgctgtagcttgaaccccaggatatagaaaattacattattctataatgtgtattataaaataccaccacaaagtttatttttaccagataattatttaaactatcatctaagagaaaaaagataatgctcaataatctgttttagtattataattctattaatattcaatcagcatttgtcatttcttagactgatagtacagaaaagagggctctttcctattagtttaacattagatactccttttaatccaggcaatattttttaagtccaagcaaaatgtatgtgctgtgcaagaaacaataacagataatcaagagagaagagcccaatcaatctgtaaccacttagttcttaaaaaagaaatctaacttttataaaatatccaattaaagcaaaacaagaagaaaatgaaattaagatgttctctgacccctagtaataaaactgctaaaatttttctcttatgtaaaaactgatacatatttttattaaataaatacctatataaatgccatttattatttgccccactgtatttctaaatagcatactaaaatacagggagtaattacacttgtttttatcaagattcataaagactacagaaatccaaactttagaatgtcttgataattaccaaatttttctcaatgagttatttctgctctctatgcaaatggatttgcaactggtgctactgcttaccactatttatttgtatcttttaagcctcaaatcttaacaaataggtcatgtttccaaaagggaatgcagatttaaatactaaatccttagtgcaaagcatactcccataaaactttaacattccaagtgtcaaaattctgataacttccttttaaaattatatttaaaacagttactccaattctaaatgccttttctctctcgtatcagcacctatctctttagtattttccctttcattttttattttctccagcttctaaatcctccttgaatttttcagaatgacagtaaggtcaagatggatctaaagggctttagaagctagataagcttcagaaaaagaccatgagccctggctaagagatgagaagaccactgcatggttagaaagtattggtgaaaaaacaattaacatttgtctgtgacactatcaatcaatcaaggaagggatagaatccagatcagtgtgttgtaaaaacggctgatgaagaacaaccatccgaactggctatcacagagctgaagttctttctaaatagaagtcagcttgattttattaaatgaaagctccttgcccattcccttacttcttccctcccgttttccttccttcctaccttccttctttctttattccattatttcctattattttctcagtcttcaacaaatgatctactactgtgcttcaaaattggattctgagtgatgttccaatggagcctacatgcagatgcatatgttcgggttgcatttaattgcttaaatagcctcttactattttttattcaaattcagaaatgagatatatattttgttctatacttattttgtttttatgctaaagtcataaaaatgataatactaagttaagagttaggaagcaattcttcaaatccatgcctgtcacagattgctttttctcaaatcaggtttgaatttctgaaagagattgatataacgttagagtatggataagaatagtcaacaaaaagtttttattttaatatcctacccaattctgttttttttagcctttcatatgttatatcagtgcactaagctaataattactgatacaattacaaaagcataacttttttagctaaagtttgagttgagagcatatagtatagtagtcaaagataaaagcccaatttatttgtaataataacaaattcagagcaagtccatatactaggattaaatgcattttaggatgtaaaacaggctaaaatatgtctctcatttctataaatagacctgaaatcttttagagctccaagaaaagaatgctaaaacttcatgggagaaaaagagagctatatgaacaacaggaatacacacttaaaccatgtggacacagctttatataaaagctactcattaataaaatggctaataacttcaaagcgtttcgcattcctattagaaaattaatccttactgcaatgctcagttaatctagctatatgagttcccatttcagtagaagaaattgagggaaaaaataaagcagcctttgcatatctacattttcagccatgaaaatatttaatagcaaccactgattgcctttatctataggacaatgaaagttagtacatacaagcttatcaatgtttaatctcaggactaggagattccaggaagactcgaacctgtaagaaagtctcttgacaaatgactgctttctaccccattatctgactgccaaacctctagaggcataccacaattggtgctaagcattctccacgtaataatataaagtaagtaggatgatattttttctcagaagtgaattgttactaagcactctataagcagaagacactactgctaccaccaaaaggttcctgatttgaaatgagaaaatatgtaattgatacaaagttacaaataaaatttatgttttcaaatttctatctcaaaacaatatccaggtatgggtacaaattaaaagtaaggatccattccctttgtgccacattcctcaactacattaatgggacattagtattacagaggcaattgatcagatcagactttgacctattctgatcaagcataaatgcaaaaatcaaagtggtaaaaataagcaaagaaggcctgtttgcattatgtacatggaaagaataagatcacactgagtggctttaacacagtaatcatgtaagattccaaatggaaaaaaaggactgaacagccccaagacactcttggattattttataaacataaatatattttacaaattaatttgaaaacaattaactaattagttacaatgctgccaccatcctcaaaacaattaaacaatatgcagtaaatttattatctgactttgacttttccaagtttaatgtctttaagttgtcatcatctgaaaaacaggagagaaaatatatgctttttggaaatggaaataaagaatcacaacattacagcatgaaaaatgtcaccataatatgtacatatttttaaaaaatgaacgtaagtcataatgctaaagtagcattatgctaaagtcgtattgaaatagaaaatgccaaaattaattcctcttactttgaaagaatctgtttccattaaccaatatttattcaatgaaatgcaggactttatcttctctaatttttataaataataatgattaaaagagtactatcaaaaatcgcgagctggacttcagttctcacctataatttaagcaaggatgtaaacgttttgatgtattataaattatcagttgcattgtttctggttttttctttcccttttcaaattaaagcttttctctttcaagaaatttgagagaaaaggaagatagaattcagaactattttgtttttaaaatatcatgcataataaattacaaagcaatgtttctgcttcctaagtacttaggtttcgggccaggtaagtcaagaatgctttatcacagctgagtaatgttttcgctaattaacttagtaattaattttatgatgtaagaaaaatgaaaagaaagagtatgtgagatattgatttcctaatctgtgtggtgatattttgggaacaattttaaattacttctagtcagacaaacctgcagcagtattaactcccacactgtacaaaataaaggtatttcagatagatcaaaaataaataaacaaattgtcattaaacttacagcatggggaagaggaagagataatgtgacaaatctttattgcactttacaacaatctacctataagcaaacacttattttccctttacctcgtgatatttaaacttagaaatgctaaaacactagaaacaacataaaaaatatcttcaaaatattttagtgaggagaacaattactgctggctctatgtgcagattttctgttgcttattaacactttgagaaaatagtaaagcaattccttttatttttaccataggaatcataaatttcaaatgtaataaatttttctatttacccaagaacaatgataacttatcaaaagtatccatgaccttggtttacaattaaatccagcaaaatatatttatatccccactgattatccatctcacatttttcattaggaaacacagagttgcacatgccagttactgtacatttttccacagtggcaagtgctccacaatacagtgggataaaattggaacttggagagcttgaagagcactcttaaattttaattaaaaccctccaagctcactaaaaataattagacactaaaatgtgccagttttattttgaagtcactataacgtacaaagcacactccctgacgactgctcatgctcttctctctctctccccctctccctctctctccaatgaaacaactgattttccaaataagaacaagggagtataaatagaggctgttttcaggcctgctcttcacgctgggaagctgacagaaagacagcggagtgggtttttcagactacaccaaataaacctagaataacttccctaaccaagagtacgaatcactaacaaactctagataaaatccagtctgcaagtaacaccatgagttatattactgatcttttttgatccaaaagtcaaacctttaacctcttaaatgtttttgctatcttaaaatatctcatacaatactatattccgtcctatttttagccaagcagcaagagaaagcatgcctttcccatacagcagggcaatgatataaacatcaacacagatgctctgccaggaggagctggacttctcaagcacttgatcattaaggaatgcaccaactgttttggataatctcgtgccagctccccttttgctccacactcccctctgggagtggccaatcttgtcctggtcctaatttttcattttactcctccataacacccctcccccattaccaaaaagatgagaaatggcatttatgcctagcaatgaaaaagcaggctcacttccccaaacagaccaaaactttaaaacaattaaccctcccctcttctttcagataaattactaagtataaaatgcaatctgtttcctttgtttactcaatatgaacaatttgtaaatgactcaaggataaaattcagaaaatgttgtgctaaattagaaccattataaacatgctaatgactcaatgcttgagtaaaacatgcatgatcggtgtgaaaaaatagatttagttcctgtgaaattctgttgtgctgccttaaaacgatttggtcattaaatcagatatattccttccaggaaaaatgttaattccaaaaccactttactagataatatagtgtgtgtgtgtgtgtgtgtgtgtgtgtgtgtgtgtgtgtggcagtggaagctattggaaatgtaattagaactgttagatgcaagattttggaatgctcataaggaagaaaaagctccataccacatttgaaacctgtacatacacatacagacatcatcataatcggtacaatattctctctatacacaatttttatctgccaaattcttagatatttttttcataggcattccttaaaaccagtacttaacatacgtcaatgaaagtcacattgttctataggtgcaggtaagagttatctcttttatctgctttccaaggctgcctaacacctataacaataacagaaattgttcaaaagcaacttctgaaatttccttcaaagcacaactgttatcaatgccaatctagaaaaagagggaaacatacagcggatgattcagaaacctatggcctgctgctataactaaaaaagacttcaatgatcataaagaccaataccctcatttcagaaatgagaaaacagagtcaagataaggaagtcacctgtcttgccaatgtcaaaatgttggtgacagagccctaactacagtgcagtgcttgttttgctgacatgactatttaaatcattatttgaacataggtttgattgtccccacaatgtagtatccaaaagtgaaaaataaaaaaattactaattatttgcttcagatatgaagtaagacactctaattctttggagaggggtgcaaaaaatcctgcatattgcaatgaaaaccaatagtggtcaactgccagttctcctatgcacactcacttatgctggttttcctttcctccacaattctttttccataatgctttattttgtttgaattaaaagctctccttttctgaataccatccactaatgaataggtaacagtttcctaaaattactgttgaactcataaggtaattccttccaaggtaagttttattttcatctatcagaagtacatgtgcaggctgaagccttggtttttcactgtatcttattgcccaggaggccttcagatgtgccacaattttaatggaataaaaacattccattagaaactatggctgtccatgttgctaaaatattactcatcgtgacatcttctctatcccctattttctgctcctgctttttgggttctacaactatttgttttatttttactttttaaaatacatacttcacttttttaaaactgtattctaatttctgtggagataataatttctgtatccagtgtgtcctatattctttattttggtttctttgggaaaatatttctgactgctgttgtcttgatgagagtggtcaatcatagttctatgttgcttgccttctactgctcccccttgccacacaaagacaaattcaatccaatcagaattacttgctggaactatctaaaggctctctcatgctcaggttggaagctatatgcatgtggacagtcatgaccatcccacctggcacatagatagagcctgcctgcaataagagtgaatgaagccaaaaatagaaagaaaagcagaaggagcagcagtaagaatggatacagaaaaaaatctttacctcatgttagcatacttacatcccaaaatagataaaacagaattttattcctgggcttttggtaatgtaagccaatacattcctattaatttgagttgggtttctgcaagttgcaacttaaaaaaatctaaacattatgaaaaccataaccaaaagtgtcatacatacacgaatgtgctatattctaaattttaaccatctggaaaccaccaaagagttaacttgtactaccacattgaaatatttattatgtatacagtcatgagctgcataaagacaaactccacatacaatggtagtcttgcataagagtataatgtcatatatttactgtaacttttctatgtttagatccacaattatttatcattgtattacaactgcctacagtgtttagtacagtaacatgctgcacaggtttgtagcctaagatcaataggttatactatatagcctaggtgtgtactaggccataccatgtaggtttgtgtaagtaccctctatgatgtttgcatgacaatgaaattgcctaaggatgcatttctctgaatgtatcctcattgtgaagcgacatgtgactgtgctttgaaacaaacttcttgcttcattgaaagatatacaaagaccttaaggtaaatgtttaaagcattgctacttacaataacttgtctatataaattaggactttctcaacatgatgcaaccaaaagaaaacacaccagaaattaagtgaaaactgaggctcattaaaaaaaaacaaaaaaaaaacctttcctctgagatcagcagtccctaatttcaaagttacgtgttcaaaacagcttcactgttctgattaattgactttatagttaatgccataatattaaattataaaatgtttttactgataaaatatccatttttatctattttactttatatattggcaatccacaaaagatcaatttaaaacaaggttatagtcctcaatttggttttaaggaccctttatagtttgaccctgctgattaagttcctattattctatttacttgaaactcttctttttgtccaaatgagtacaccaagcatgcctatctccactgtacatacctgtgctttttcacttcccctctttgatcaccacatcctcctgacctgaatgtctccccactttttgacttacgaaaaaccctcctattctactgtgcctacatcaaatgccaactcctcaattatgccttgattcatcacttcaaacataaattctcgtcccctcaaggaaaataattaacacttgctgagcacatatctgtcaggcactgtattttttatattcttctcatgtattaatcaactaatttaactctaaatttcatgactccttttacatctaccaccactagtacttatcaatttttaccaccatctgattaattatgtgatcaagtttataccacaatacgataactacatattaagtttcttgatggtcagggaatgtttctgataccactttgtgtttttccataatgcttaacccagagctctgcacataataagtgctaaaactaattccttgatatacataaaaagatcaagactattgtgtgtcaagcagctataaaactagtttttttaattaactatattcatatataatttacatataataaaatgcgcccatttaaaatataaatttaataagttttgacaaattatatactcatgtagctccaccctcccgaaagaagatacagaacatttctaaaaagttatcttatgctccctttccaggcaatcatccatgctcctggactcaggcaaccactgatatgatttctatcactataaaataattttgcctattcttgaatttcataaaaatgaaagtatacaatatattcttttttggatatggattcattcactcagcataaagttcttgagattcattcctgttgtagcatgaattagtagtctggtcctttttattaatttccattttatgaacacaccacataatgtgtgtataatgtgtatctattcatctgtctatggacatgtgggttgttttcagtttagatgtattagaaataaaactaatatacaaattcattcacaagtctttttatgaatatatatctatttttcccccttaaaaattgaatttcctgtaaaattggggagctatgtgcctgactttatttttataaactgccaaaaggttttccaaagtggttgcaccattttatacttctaccaacaacgtatgagtgttctagttgtttcatatcctcaacaatatgtcttagtgttagcactttaattttgtcacccagaggataagaagtggtattttaatgtagttttatttgtatttccttaatgactaagatattgagcatattttcatatgctttttgaccattcatatatattttgcccatttttacactgggttgtgaagtcgtctctcaaatatatgtaatgtaaacatttttacctagtctacagcatgcctttttgttttcacaaggtgtcttttgaggagctagagttttcactttaatgtgatttgattatcaattttttaatgactagtattttctggattctctctatgaaatttttgtcttttcaatatcacaaagatttttttcctatgttttcttctagaaactttagagtttagttttatatttaggtctatgatcaattttaatttattttgtatgtatggcatgaggtaaaagataaagtcagttttctttcatataaatatccagttgttccagcaacatttttcaaaaagattatctttttcccaatgagttatcttgtcttaactgttgaaaatcaaatgactgtgtatagagtgtgtatgtgtgtgtgtgtttgtgtgtgtgtttgtagatctatttcttaattcttttctgttctattaatcaattcattatcctcactataataccaaactgtcttcattgttgcagccttacaataagttttgaaatcacgtggaataagaatttgttcttctatttcaaatttgttttggctacgctaggtcctttgcattttcagataaattttagaattggtttgcctaccaaaaaagaaaagactttctggaattctgattgaatttgtcttgaatttacaggcaatttttaagactatatttaatattagcatttaaagatataaatttccttctaagtattactttagctgcatcccacacatttcgttaggttgggttttcattatcatttagtttaaaatactttacaattttccttgttctttcttctttggtaagtggtttatttagaaatatgtggtttaattgccaaataatttgaatttaaaaatgtttcatattgttattgatttgtacttcatttccatgtcagaaaatatacccattatagtttcattcattttacatttgagatttgttttatagtccagcatgtgccttatcttggggatgttccttattcccttgaaaataataattatccagatgttttttagtgtagtgttctagcaacatcagttaggttaagttgataattttgttcaggtcttctacagtcttacagatttttctgtctacttgttttatcatattctaaaagaggtgtgttaaaatcaccaagaataattagattgtggctgtgtctttttcttcttttagttctgtcattattttgcttcatgtattttaaagctctgttattattaatacatgtatatatgcagaaatattatgtcttcttggttaattgaacctttaatcattatgaaatgtccttctttatctctgataatattccttctcctggagtctacttttatattaatatagccttttaagccttcttatcattagtgttttcatggtacatcttcaaaaaacttttaacatatttacatctttatatttattatgtctcttgtagttagcatattaattgggtcttgttttttgttaatccaatctgataatctctgccttttaaaaattagtataattagtccatttagatttaatgtaataactgttaagtctaccatcttgctatttttaatttgtcctttgttcctttgttcctcttttcttggctttttaattattattttttttagaattctacttatctcctttgttggtttattaactatacctctttatttcattatttaaatgattgatccagggtttattatatgcatctttaacttacaacagtctaccttcaataatataccatttcaaatacaatgtaaggaactttaaaacacctttattttgtattattgctgtcataggtattagttccatatgttttaaacctcattatacatggttattgtttattctatagaatcaatcatattttaagtaaattaatcattagaaattaaatgtcatatatttgcctccagagtaaccatttacagtaaccttcattactttttaaaatctaagtttccatctagtattattttcttcagcctgaagaagttttttaaaatttttaaaattaaaatctgctagcaataaattgtctgaacttttatttttctttaatgtctttatttcaccttcagatgtgaatattttttctaattataaaattgtaggttgcaatttttttaggacctcaaagtatgtcattgtgatatctaactgaattgtttctgatgtgaggaatcatttctatctttgctccactgtatataacatatctttggctacttctaagactctctttcatttgtttccagccatttgattttgatgtgctttggtatacattcttccctgtgtttatacttcttggatctaagggattatattttttaacaaatttatttatttttaatttttcattattatgggcacataatagttgtatatatttacaggtacatgtgatgttttgatacaagcatgcaatgtgtaaatatcaaatcaaggtaacttgggtatccatcaccttaagtatttgccatttctttgtgttagaaacattccagttctattcttctagttatttttaaatacatagcaaattatcattaactatagaaaccctcctgtgataccaaatactagctctttttcattatatatatttttgtacccatcaactatccccattttatcccctgctccccattatccttcccagctactggtaatcatcattctactatctatgtccgtgagttcatttgttttttaagctctcacatatgagtgagaatatgtcacaaatatctttctgtgactggcttatttttcttaacgtaatatccttttgttgaatccatgttgttgtaaacaacaagattttattcctttttatcgctgaataatatttattgtgtatatgtgccatgtaccacattttatatccattcatctgttgatagacacttaggttgactccgtatttggctattgtgagtagtgctgcaataaatatggaaatgcagacatctcaatatactgatttcctttctgtattagtccattctcatgctgctgtaaagaactgcccgagactgggtaatttataaagaaaacagctttaattgactcacagttctgcagggctggggaggcctcaggaaatttacaatcatggcagaagggaaagcaaacatgtccatcttcacatggtgataggaaggagaagaatgagaactgagtaaagtgggaagccccttataaaaccatcagatcttatgagaacttactgtcacaagaatagcatggggtaaaccacctacaattacctcccaccaggtcccttccatgacacatggggactataagaactacaattcaagatgagatttgggtggggaaacagccaaaccatatcattttgcccctggtccctcccaaatttcatgtcctcacatttcaaaacacaacaatgcccttcccacagtccccaaagtcttaactcatttcaccattaactcaaaagtctaagtccaaaatctcatctgagacaaggcaagacccttctgcctatgagcctgtaaaatcaaaagcaagttagttacttcctagataaaataggggtacagacattgggtaaatacacccattccaaatgggagaaattggccaaaacaaaggggttacaggccccacgcaagtctgaaatccaataaggcagtcattaaaccttaaagttccaaaatgacctcctttgactccatgtctcacatccaggtcatgcagatacaaaaggtgggcttccatggccttggacaactctgcctctgtggctttgcaaggtaaagcccaacccctggctgctttcagtggctggcattgagtgtctgtggctttaccaggcacacagtgcaagctgtcggtggatctaccattttgggtctggagaatggtggccctcttctcacagctctactaggcagtgccccagtggggactctgtgtaggggttccaatcccacattttccttccacactgccctatcagaggttctccatgacagctccacctctgcagcaaacttctacctggacatcctggtgtttccatacatcctctgaaatctaggcaaaggttccaaaacctcaattcttgactactgtgcaccctcagatcctacccctcgtgaaagttgccaaggcttgggccttgcaccctctgaagcaacagcctgagctgtacttttgccccttgtagccacagcaggagctgaagcatctggaatgcaaggcatcatatcccaaagctacacagtgcaggggggccttgggcctggcccacagaaccatttttccctcctaggccttttggcctgtaatgggaggggctgctgtgaaggtctctgacatgctctggagacattttccccattgtcttagtgactaacacttggctccagctgggcacggtggctcatgcctgtaatcccagcactttgggagcccaaggaaggcagattatgaggtcaggagattgagacaatcctggctaacacggtgaaaccccatctctactaaaaatacaaaaagaaaattagctgggcatggtggcacatgcctgtagtcccagctactcgggaagctgaggcaggaaaatcacttgaacccactaggcagaggttgcagtgagccaagatcgcaccactgcactccagcttcggcaacagaggctctgtctcaaaaaaaaaaaagaaaaagaaaaaaaaaattgactccttgttacttatgcaaatttctgcagcaggcttgaatttctccccagaaaatgggtttttcttttctatcacatcgttaggctgcaaattttccaaacttttatgctctgcctcttcttgaacacttggccgcttagaaatttcttctgccagatatcttaaagcatcattctcaagttgaaagttccacaaatctctagggcagggacaaagtgctgccagtctctttgtaatgcaaaacaagagtcacctttgctccagttcccaacaagttccttatctccatctgagcccacttcagcctggacttcattgtccatatcactatcagaattttggtcaaagccattcaacaagtctctaggaagttccaaacttttccacatcttcctatcttcttctgagcactccaaactgttccaacctctgcctgttatccagttccaaagtcacttccacatttttgggtatctttgtagcagcacaaaattctaccagtaccaatttatctgacatgtaccagtaataaatttaccaaattataccaaaaataaatttatcagacccagtaccaggatctgataaatgccaccaggtagaaagccaagctaatctcatggcttactttattttccttctctcatatactgcagtctagtgctaactattgtctaatttcttaaaacagttatttcatacagttgatcaagtgttctcattgtttatattacgaggttaattccagtaccagttacttctttatggccagaagcagaagtagaatattactttttaaaaggctgttgtctcagaaaatgattctctacgatttacttttttaaaagacagtttaggggtttccccactaagtttctataatattttggctttcatttagaggcagaggggaagccaaactttataaagcaggagtccccaacccctgggccatggactggtaccagccttactggtaccagcattaccacctgagctctgcctcctgtgagatcagcagtggcgtttgattctcataggactgagaaccttattgtgaatggtacatgcaagagatctatactgtgctctccttatgataaagaattttgagtgccattaaattttataaaacataattgcaagccacggccttgccttttttagaataatagaatatcaaggctaaaagagcttctggagatttaacagaatgaaaataggaaaccataagcttaaaacctagcattagaaattatatcacatataaatggactaagcatgacatattaaagaaagatagtaaaaagcgaatgaaaaccagatctcaattaggttgtttataacagataaactttaactataaaaacacaaaaaatattcaaagtaaacaagataagtggggttatatcatgtaaacactaactccaaaaaagctgatgtagatgtattaatatcagataattaatattctaagtcaagaagcatcaataaagaaaagtatcacataataataacaggaaaattccaacaatcctaaaattacataaaaccaataacataaaccaaagctgacaaagaaaaataagatatatccacatgattgagattttaacatagctgcctcaatagaataagagaaaaatcaacagagatatagaatatttaaataataagattaacttacattaactaattcacatatatcaaacattacactcaacaattacaaaatatacattttgttcaagtgcacatagaaaatgactcatatagatcacatgttgaatgataaatcaagtctaaacaaattttaaaaccatagagtgtatggccttttatcacaatggaatcaaaacagaattctgtaatagaaatataactagaaagtccctcaaatgattgggattaaaacaatctatggggcaaaaataaacacagtgaaaattagaaaatatttcaaactgagttataatgaaaatctgacatctcaaatttttatgtctgctaatgcagttattagaactttaaattagtatattacaaaagcagaaaggttaaaaattaattacctaagctctatcttaaaagctggaaaaagaaataaacgcccaaaaatgaacaattaaggaaataccagagagcatcagtgaaatagaaactgtagtctcacagagcaaaataagcaaaactaaaagatagttctttgaaaagattaatgaaattaataaacttttaggaagattgatcaagtaataaagagcaaaaacattatttatatcaataatgaaaaaggagacattattccatatatatgtattcttacagacattgataaagagaatagtatgaagattatgctaataaatttgaaactttaaataaaacagaaaacttcctgcaaaatatacatatcaaaatagaaaacagaaatagtgctatataaagatattggatctataatgtaaagccctctcacagagatgactccaggtcctgattgccacactggtgaattgttccaaacattcatggaggaaataataccaatgtagtacaaacttgggaaacactatccaactcatgttaggggaccagccaaatatcgacagggacattatgaaaaaaaaataacttccagaatctccgtcataatcatagatgcaaaaattctcaaaaaaattagcaaatataatctgacaatatataaaaggaccaagagggtttattccaggaatgcgaagttgcttgaagattcaaacaccaatcaatataacataataaacataaaaaatcacataattatataagatgcaaataaaacactttataacattcagtatccatttgtaattttcttttaaaaaaaaagaactctcagcaatgtaagactaggagagtaccttcagaaaacatcattattaatggtaaaacaatgaatgctttcgtctgaactcaggaacaaaacaaaaatatctactattactcctctatgcaatattatcctggtgatcttagagaaataagaaaaagaagcaaaaagaacatatcgtagacttcccgtttccagtccagcatataaggaactcagcagtcttcacttcatcctaacaagtaaatagctgaataaactgaaaagtcaacagctcttcttagattcatcagagaagtgaggtcacccaacagattgctgcccctcagattccagagaaagacaggcaaaaacagagaatcacagcttaccagaggagaaacccaggaacagaaacctccacaggaaccagtgtcggtaggaactttggaactgtgatctacgaactgctggatgctcagggtgcacaactctcagagttaagaactccaaggatacccagtcaaaaggggatggccacactttggggagttttacctccagaagctctaccaggtcctcacagagagtgtcagaggaaaattcccgtgtgattccagcagggggaggagattaagaagcatttttaaatacaccacaacattctgttctttttaacaagtcctgccttcaggaaaaacgatttttccagagcctaacctgctgttttatcacagcataacctacctagggtaagggaaatacccaactccaaccccctcaagccttccacttgggagaaggaaaatactcaactccagcccactccagccatcctctcccacctaagcagggaaattattgagaagcattcatgaaattcacagtctgaagacacaggctcaccaaaaacctgagatgtaatcataggactatggaattcttacccttccctcacacgttaccactacatgactaaagtcctatttattacggttccttttacccagtacatcatgtctgcctttcaacaaaaaattataagacataccaaaaggcaaaaaacagtttaaagaaactggacaggctgggcacggtggctcacacctgtaatcccagcactttgggaggcctaggcgggcagatcacctgaggtagggagttcgagaccagcctgactaacatggagaaaacctgtctctactaaatatacaaaaaattagccgggcatggtggtgcatgcctacaatcccagctattcaggaggctgaggtaggagaatccattgaacccaggaggcggaggttgcagtgaaccaagatcacaccattgcactccagcgtaggtaacaagagcaaaattccgtgtcaaaaaaaaaagaaactgaacaagcatcagagccagagtcaaatgtagcagtcctatgaggaatgtttagaattattggaccaaatttttaaaatatataattaatatggctaagaattttagtagaaaaagtagagagtatgcagacacaggtgcataatgtgagcagagagacataaatctaagaaataatcaaaaataaaggctagagattaaaaatgctgtcacaaaaatgaagaatgcctttgctgggctcactagtagactggatatgactaagaaaagaatctgtgaactagaggatatatcaacagaaatctccaaaggaaaataagactggaaaaaaaaacccagaatatccaataactgtggaacaactacaaatggtatatcatatgtataatgggaataccagaaggaaaagaaaaagagaaaggaacagaaacaatatttgaagcaacaattcctgagaattttctcaaattaatgtcagacaccaaaccacacagatccaggaggcacaaagaacactaagtatgataaatgtccaaaaaaatacacctaggcacatcatattcaaacctcagaaaataaaaaataaaagaaaaaccttgaaagaagtccagggttgaggaagtgggtggaaaacacttaacctatagaggagcaaagaaaagaattacatatgacttctcctcagaaaccatgcaaacaagaatatggagtgaaatatttaaagtgatgaaaaaaaaaacacttagcattttgtacctgtaaaattatccttcaaaagtaaagtagaaatgaagactttctcagacaaataaaaattgaggaaatgtgttgccaggagatgttgaagttcttcagggagaaggaaaattatatagtttagaaactcagatgtgcatacaaaaaggaagagcattaataaaagaaaactctattttcttattcttgattgatctagagataagtttgttcaaaataatagcatcaatgtacttgattacatatacaggtatattacattcatatatattacatacatgtatagttatacataagaatatcatttttcatatgtatatgcttatgtatatgtgaaggaatgacagcagtaatacaagggatgggatagaggaattcagaatattttgttattatgaggtacctgcacaccttgtgatgcagtatagttatttgaaagcggacttggattaattgtaactgaatattgtaaactctaggccaaccacttaaaagaagtataactgatatcttaacaaaataagagaaaatggaataatataaatgctcgattaaaaccacaaaaggcaaaaaaaaggcagggaaagcaaaaataaaaatgaacgacaaggacaaatagaaaacagtaccaaatatgggtaggtactaatccaactacaccaataatcataaatgtcaggggtctaaatacaccaatctaaaaacagagattgtcagagtgggtcaaaaaaaataagacccaactatatattatctataggaaaccactttacatataaagataaatatagattaaaataagagatggagaaagatataccatgctaacatatcaaaataagtggaagtagcaatagtaataagacaaagcagacttcagaacaaggacagttatcaggaataaaaagagtatttcaaaatgttaaaggggtcatactcctaaagacataacaatccttactatatatacacctaataacagaatatcaaaatatatgaggcaaaaactgccaggagaaatagatgaattcactattatagttgaagattttaacacccctctatgagaagtggacaagttcagcaggtagaaaatcagtaagaacatcattgaactcagcaacaccatcaatcaactagatgtaattgatatctatagactacttcatccaccaacagcagtttacacattcttctcaaactcatatggaacagtcaccaaaacagaccacattctgggctataaaacacaacaagttgaaaacaattgaaataatatgtctgctctcaaaccacaatggttttaaactagaaatcggtaacagaatgatagctggaataacccaaaatacatgaagattaaacaacacacttttaaataacacatgtgttaatgaagaaatctcaagagaaaatttaaaatattttgtactaaattgaaataaaaatacaacttctcaaagtgtgcgggatgcagtgaaagcagtgctgagagggaagcatacagcatcaatctaaaagcgataagctgagcctccactttagaaaactagaaaaagaagagcaaattgagtacaaagtaagagaagaaaagaaataatgaaaactagacctgaagtcaacagaactgaaaacaggaaatcaaaaaagaaagccaataaaaccaaaagctagtttttggaaagaccaataaaatagatgaacttctagccagactaaaggaaaaaaaaaaaagagacgacgcaaattggtaatatcagaaatgagggagggaatatcattacagttcccatggacaattagaaatctttttaacaactccatagccacaaacttgatagcctagatgaaatgaactaattccttgaaagatacaatctgcaacaattcacacaagagaaacgacacaatctgccaaaattcatgctgaaagtcctttatatattaaagaaattaaatcagtaattagtaaccttccaaaacagaagcaacaggcccagattatggaataaatgatgccaattctatatcatttctttcagaagatagaagcaaagggaatctttcctaactcattttatcaggtcagcattatcctaatatcaaaactagacaaggatattataagaaaataaaaaccatacatcagtaactctcatgaacacaaatgcaaaaatcctcaagaaaatattagctaattgaatcaaataatgtgttaaaagaattatataccacaatcaagtgggatttatcccagttatgctaggctggctcaccactcaaaaaatcaattaatggaatacatcacacatcaacaggctaacaatgataaatcatatgatcatattgatccagaaaaacatttgacaaaattcaacgcccattcatggtttaaaaaagaactctcagcaagctagaaatagagggaatgtcctcaacttggtaaagaacatctataaaaaacattgagctaacatcacatgtaatggtgagaaactcaaagctttcccagtaagattagaaacaaggggaggatgtcccctcttaccactgtttttcaacatcatactggaagtcctagctaatgcagtttaaaaataaaataaataaaataaaataaagggtatacagattgggatgaaaaaatgaaactgtctttgatcacagatgacatgatcatctgagtagaaaataagacataattgacaaaaattcctggaaccagtatgtaattatagcgaggttgcaaaatacaaggctaatatacaaaagtcaaccactttcctatttattagcaaagaccaagtggaatttgaaatgaaaaacacattaccattcatattatcactctaagaaatgaaacattttggtatacatttaataaaatatgtaaaaatctatatgaagaaaactataaaatcctgataaaagatattaaggaagaactaaataaattagagatattccatgtttatggattgaaagactcaatattgtcaagatgtccattcttccccatttgatctatagattcaatgcaatcccaatcaaaattgcagcaaattgttttgaggatatcaacaaactgattctaaagtttctatgaagaggcaaaagacacagaatagccaacttactattgaagaagaacagcaaagtcagaaaactgacactatccaacttcaagactcaatataaagctacaataatcaggactgtgtggtactggtaaaagaaaaaaaatcgttgaatggaacagaacagagcgctcataaacagactcacataaatatggtcaactgatttttgacataaagcaaaggcaatctaaaggagaaaagataatcctttgaacaaatgatgctgaaaaaactggacatttatgtgcaaaaggaggagtctagacatatatcttatgctcttcacaaaaattaactcaaaattgatcatagacctaaatgtaaaacacaaaactaaaaaatttctagagataacataggagaaaacttagatgatcttaggtatagcaataactttttagccagaacactaaaggcacaatccattaaagaaataattgatagacaaggctttattaaaattaaaagctactgctctgtgaaagacactgttaagataatgaaaaaacatgccacagactgggaaaaaaatatttgcaaaagacatatctgataaaggaatgttagccaaaatatacaaataactcttaaaacacaataagaaaacaacaatccaattaaaaaatggtaaaagacctgaacagacaccaccaaagaagatacacagatgcaagtaaacatatgaaaagatgtccaatatcatatattattagagatatcactctttaattaaaagaatttaaaaaaatgacatatcactacatgcctattagaaggaacaaaatagaaaatactgataataccaaatgctggtgaagatgtggatcagcaggaacgctcattcattgttcatggaaatgcaaaatagtacacaacttagtacaggacactttggcagtttcttataaaactaacattctctaatcatacaatctagtaatcatgttctttggtttttctcaaataaaaacttatgtccacacaaaaacctacacagaaatgtttatagcagcttcattcataattgctcgaacctggaaacaatcaagatgtctttcagcaggtgagtggataaataaactgtggtacatccagacaatgaaacattattctgcactgaaaataaatgagctaccaagctatgaaaagacgcgaaggaaacttaaatgcatttaagtgaaaaaagccaatctcataaagctattatgcatactgtaatatccaaactatctggcattctagaaaaaataaaactatgaagatattaaaaagattaatggttgccagggattgggggagggatgaatacatagaatacagagtatttttttacggtagtgaaactattctgtatgatactgcaatactacaatggtggatagatgtcattatacatttgtcaaaacctatagaatgtacaccaccaacagtgaaccataatataaactataaactctgggtgataatgatgtcaacataagtttatctgttgcaacaaatctaccactctgttatgagatgttgataataggggagtctgagagggagggacgggctatatacatgtatatacacacacacacacatatatatacatatatatacacacattatatatacatatatacacacacatatatacatatatacacacacatacatatatgtatgtatagaaactctctgtactttgcactctattttttgtgaacctgaaactgctattaaaaattaagtttattaattttaaaaaacatgtaaaggagaaaagaaataaaattcaccattcacaaacaatttggttgtatatatagaaataaatttaaaacctaaaataaagtattagaattaagaaatatatttagcaagatcattggatatgaggctaatatgaaaatatatttatttcaaatatttgcaaaaaatagaaaataaattttaaaaaacaataaatctacaaaatatacagggtgtttacatacatccattaaaaccctacaaaatattactttaataattttctgaaatcctaaataaatagatggacatattctgctcatacattggaaatcacaacattcttaagaagtaaattctccctaaattgatatataaacacattgcaatcccaattaaaatcccagtaagtattttcttttaaattgacaagtatatctaaaatgtatatgtaaacacaaaggcccataatcagtaaaaaaaattttgagtaagaacaaaattaaaggagctgactgccttatgaatttattgtgaagctacagttagtaaatagcttgcattgatacaatggtaaccaatagacatagaacaaaatagaacaaatatctgctacaacatttaaactcaaagacattatgatgagtggaaaaagtcaaacacaagaaaagtgtatactttatagttccatttatatgaagttcaagaagaaaacaaaattaatctatggtaataagagtgagaatagttactatctttcaggggttatgattgggagggaggaagagggagtcttccaggatactagaaatgttctatatcttgctatggatggtggttacacacataaaaatgtggtggaatataaacacatataaaaatttagtgaaagatacacttaagattgcatattttaccacacgcatgttatacttcaatgtcccaaatatgtgtgtgtgtgtgtgtgtgtgtgtgtgtatatatacacatatacatatatatattcatttatgtatttatttttagacggagtctcgctgtcatccagcttggagtgcagtggcccaatctcggctcacagcaagctctgcctgctgggttcatgccattctcctgcctcagcctcccgagtagctgggactacaggcacctgccaccacacttggctaattttttgtattttttagtagagacggggtttcaccatgttagccacgatggtctcgatctcctgacctcgtgatccactcacctcggcctcccaaagtgctgggattacaggcgtgagccactgtgcccgggccaatgtcccaaattttaaaataaagaagtactattctttatttacacaaatccttaagtaatatatgttatattgtgaaaatgaaaataaataccatttttttaaagttacttccccatttgttgaggtaaaatgtttaacctagctggcctctagagactacttcagagatcaacacaactattgcctgagccaaaaagagatcatctgacatttggctatggacaagccatgctcttcagaataggaacaaaactgaaattataagatctcaaggtgtctgaaaaatatatgtatttttgtcttggttcaataaaagggacacactgtctacctgctctagctagaagtaaaatgacaccttctatgtgaccattatcatccgaagacaagtagctggggaattaggaatgaagcaatctaggaaaggtacaaagtttctccaacctttaatttccaatcatccaaacatttacccttagaataaaacccaaaatccttcatatagcttaaaaggtcccccatgttctggaacccacttacctctccagctattctcaccactctctactctctccctcatactacacagtcttattgtactgaaattctttaaattcccccaaagcaccagctgctatctgctatattccttctctcttgtgaccttcacacatactcctccctctgtctgaaacattcaaccactccatttcatctaactaactcctattcattcagttataatttaaaagtcatttcctcaataatgccttcaacagtccattgtaatattatattacctaaatcatgacttttgtcatactttgttataattaatttaccatcaatcttctctatcagactataagctctatgaggccaagaaatccatctgtcttgctcactactatatcgttatcaggcacagccattggcatatggtagacactaaacaaaaatatgtggaatcaatgaaaataaatgatcagaagatttagcatgcagtaaatcttactggatccttagaacaatcaaataatattttgtgcacttaaatttaatactatgttttaatcaatgtttattttctgtaatttttttctgccatagacttcagttctttttaatgtaacaaaaggttggctatgcttagagcaccacagaaaacatttcaaagggagtactggtagtagtagagagccaagtaaaaacggggaaaaatacaatatcaggtgtaaacccacccaccccaccaggaaattcttctggggtatatactctgagcactgaagttttgtgtagtttttcttaataatgggagtcttcttttatttgaaaaaaaaaatgacctacaaatgagtgatagcttacaaattcaatgcagtctaggtcagaccattagtctttagaagaatcatttctgtcagagttaaggtggtaaattaagtaatcaccaggattttgaaaacttctatcacaaaattttatatcaattttaacctgtattcattttcaacatttacattttaagtgaaaagataataaaagctgaaagtatgcttttgaaaaggaaaaaatgttgcagcaccaaaaacaagatcgaaatctaaatatgttcccttttcttattattttgaggggggaatagaaaaaatgaaaacaaattatcaactaagtactgttctgcaaaaatttcaaacactgagcagttcttttgattacataaagcacaaaggctctttcaacagctccctaaacagcttgatgatgaacttgatgttcttcttaatcctctattcaaatttgacaactgttaatagtgtcaaagagaatccatctataaactaaattggaggctaatgttatacatctatgagttttggctctatatgagcatcaaatgtgcgaacataacttcttactactaaatggcaagtcaagcacatcaacaatgtagtcctgaaaaccagtcagctcttagtatacaaggagtgtgtacatttattggtctaaatgaatataggaacatatagtaaaatatataaacacagaccagatactgaactaaagtgaggaggaaaatcactgccaagataggcagaaacatttcttaggaagctgaaatgtaacattgctgaacaaacgaaaatagtgaagccagtctaaaagtgtgctctttaaaagagacaatgtctcagagtgcaagttctgtaaatcattagctatagccacaaaccaaagtgtaatatttaaagaagagagctgcataccataccaataaactgtcacaagggtgatagtatctgtagctgtgctatccttagagagtgcatttgccagataacatagtgctttttacatatgaaattatgttttccatacagatgtttgaaatatataggcattggctttactgcaataaatgcccctgtgactcaaccaaaggaagaaaaactgtggtaacatcttgagttcagatcaatgatgcatttagatcaaagtgcagagaagaattcttaggtctttcctgagtttgatgtaagaatcttaaaaagcaaaatagttagtggctgagaaatactattctatggctatgtgacagttccaaacctaaaaaatctaccatttcaattagttgctaaatctttatttaatatctactctattctcaaacatcacaaaacttgccaagttatccaccgccagatgatttttctccctcaaattcacctgtctttgtcactgtaagatgttctcaaaatccaaaacttaaacatctgcaggtaaagtaagcattctgataattagggagtttatgtcaagtggcttttatcaaggataacaacagtaataaaaatattaataataacaatgatggtgatgaactctaaacttaaaagagactccaatgcgagttgaaattgcttaagaacaatagccttgatcctaatttatagtttcccaaagaaccctagagttctcctagatgtaacttactctgtatcacaatactaagtcctaatcactcccattgcattcctaaccaaaacaaaatttccaggagtaattatatgcagcttattatagcttcaatttgtactatagaaagtgaaagtattctatgctttctattttaaacttttgcaaggaactattgtaagccattgaatagaatccttgatacaccttcaagtaagctgctcatcagatatggaagaaaggataatccatagtacctgagagtttatatatttgttttctcaaagtcttcaagtaacagtgactgggcatttggcacttccagtaattgcagaatatcaggacagaattccaggtctaagtaacataattcatggtaacataattcatagtggaaaagtaagcttcaaattgttttggggtgttcatcaggaaaggcattttgcatataaaaactcatggtcaaaatgtatttttttaacttcaaacataccaaaattgcaaaaatagtacagagatttcttacagatccttcatccaaagtcctcaaatgttaacagtttatactcattctatcatttatattctctatctctccctgtctctacagtacaatatttttagtacttttattctttggacttaaaatacatagtcaaaatactggtccaatgttatttaggtagtcccacccactacccctatacatgctcagtatggttatatcatctgaaatacagttaaatccctttgtctctgtgtgtaatcatttgggttcttcattcatgtttgtttgtttgtatatttagtatgagaaatagtagtatggttctgaaatacacaaatatatgaaaagtagtcactcaactactaatccccatcccatccattctaccctactcacaccaaccccatcttttctactccatttgcacccatcatctctagataaccagtctcaatagtttatagtttacccttcctctgtttctttctgcacaattgaacagatatgtgtatgttatctcatttcttcttccttctatacaaaagatggcattctataaacattcttctaaatttatattaaattacattggaaatcacttcataccaaattacagatagtttcttcaatcttttttatagctacatatactccattgtgggactgcagcataatttatttaatcactctcctatatgcatatgtaggttgtttgcaattacaaataataagtcaacaaacagctttttgcatatcttttttcatatcactgaaggtgtatcttcagggtaaattccaagaagaggactactggatcaaaagaaagtgtatatgttgttttgacagatgctgtgaaatttgtttctgaaagacttataataacttccatgccctccaaaatagaatacctgtttcttcacaaccttgacagaagaatgtgtttcacatctttaattttcaacaattcaatgagctagaattgtcatctcaatatagttttaatttgcattacttggattacccacttctagccaagacggaggctgaatttaccctcctgcaaaaaaaaaaaaaaaagaagcttaaaaaactttgagaaataaggtttcaagattgctcatcaagcaacaaagagcagtatcccttgagagagagtaaacaaatgagtgagccctaccattttcccagcttactgcctggagagagtttccaggctacagtacaaggcagaagaactcaggtaaagcctattttccagagtcaagagattgaactaaaagttcaaaaagacttaggtggctagaaattacatggcacagtactgaagaatgacaagcttcagagaaaggaatccagagatctgcagaggggtcccttgagtgctctactgagtacgacggccagatgcatgtgagaaaactcatgaagccagaaaaagaattgtctgaaaggattagagagacccatcccagctgctcataaaggcctgggaatagtcctatcttcactagccaacgtggaaatagtcatgatttggtgcatcacacagaaaattcagaagggcttttagaagcctcagttgtggggtaaaactagcattagactagataaatcctgccttatcctgcttggaaacttaaaaacaataccctaaaggatcaaactgtttccaagaaacttaaagcatcccaagacaaagcctaagaatatttataggaatatccaacaaggtaaaattcaccatggctagtattcaactttttaaaaatcaggtgtgcagagaagcaggaaaatatgaccctaatgaggagaactatcaatcaaatgaaactgaactaacgatgacagagatattaaaattaacaaagacattaaaagagttattaaaactatattttttacatgtttgctaagctagtagaaagatgtaaaaggttaaatggaggtatgaaacacatgtaaacaaaaaattattttaatcaaatgtctagagctaaaaaccaaaatgtctgaaatgaaaaacatactgaataaatcaaatgtccaattaaatattgcagaaaaaattagtaatcttgttgacatagcagtagaaactatctaaaatgaaatgcagacagaaaatgtaaaaaaaaatgaacagagcatcagtaagctgtgagacaatatcaagtggtctaatatatgcataactagagtcctcaaatataaggagagaggaagaaaaaatattgaaaatataatggctgaaatttcttcaaatttgatgaaaactataaatctttaaattcaaaccaagcacaagaaatatgaagaaaactacacaaaggtacatcataattaacttgcttagaaccagtgaattaaagagaaaattctgaaaagtaatcccccaaaaaggcaggttattgtagaggaactaaaatcatgtgacagctgattcctcattgaaaacaactcaggccagaagacaattgtgcaacatttttaagtactaaaataaaaaataaaactctacctagaattctatatccagcaaaaatatctttcaaacaaaaagatgaaataaaaaattttagacacataaaagctgatagaatttatcaccagcagatctggactgtaaggaatattaaaggaaatccatcaagcaaaaaaattatattgaaggagatctgtatctacaaaaaggaattaagagtaacagaaataacaataacatgggtgtatatttaattttttctttttatttaaatattatttaatgataatttgctgtttagagcaaaaagaatatcaatgtattttaagatttataagataagtagaatccaaatgtataacaacaataataaaatctggaagagaaattaaagtatacgtttattgtactatagtgtaaatactatgaacatctcttgaaggtggactgtaagttgaagatgtatacaattaaactccaaggcaatcaccaaaataatgcaacagaaagtcatagctaataaaccagcaaaaaatatacatggtattattttaaaaatcaaaagaaagaaaaataacagactgtatcatgcatataaaaaacatgagcaaaatgatagacttaaatacaaccatatcaaagctcacacagataatcccaattaaatatacatggcagtctcttcaatagatggagctgggaaaactggataacccgtatgtaaaagaatgaaactcactcttattttataccacatacaaaatcaactcaaaatagattaaagatttaaacataaacttgaaactataaaactcctagaagaaaacatagaggaaaaactatacaacacttgtctgggcaatgattttttagatttcattccaaaaatgcaggcagcaaaagcaaaaatagacaaatgggattacgttaaaattaaaaaaaaacttctgcacaacaaatgaaacaattaacagagtgaagacaatctacaaattgggaaaaaatatttacaagccatacatctgataagggattaacgtccaaaatatataaagaagtcaaacaactttataaaagaaaaacaaataatttgattaagaaatagacaaaaggcctgaatacacatttctcaaaagaaggcgtataagtggctaagaaatacatttacaaagcttgaaatcattaatcacaagggagatgcaaatcaaaatcatatggagatatcattgcacacctgtttagaatagctagtataaaaaggaccaaagataaccagtgttggcaaggatgtggagaaaagggaatttttgtatactgttagtgggtatgtaagttagtatagccattatgaaaaactgtatgcaggttcctgaaaaacctaaaaatataattaacatataatccagcaattccatttctgggaatttacctgaacgatttaaaatcagtatgtcaaagagatgtctgcatgcctatgttcactgcagcactattcacaatagccaagttatggaatatcaagctaagtgtccatcaatggatgaatggataaagaaaatgtggcatatgtacacaaaagaatactattcagccttaataaaggaagaaagatgtcatttgcaataacatggatggaattggagaacatcatgctaagtcaaataagccaaacacagaaagacaaataccacattttcacttatatgtggaatttaaaacaactcaactcacagaaggagagagtagaatggtggttaccagagtctagggtatggggaaatggagagatggcaatcaatggctacaaagccacagttagataagaaaaataagtgttttttttagacatattgtatagcatggtgaatatagctagtaattgagtactgcacatttcaatatcactaagagagtaaatcacgaatgtttttgtcacaaaaatgtcaaatatttgacatgatgaataggttagtttaatcactccacatcattttcaaaaatcatcatatcatcatgtaccccataaatacatacaactataatttgtcaatacataacattaaaaagttagagatagtcaagctggataaaaagcaaaactcatatataccttgataagactatgttgctatataaatatcaaagtagagtttagagcaaaaactattatcagggataaagaggatcatttcataatggcaaagtatatgatatgatatgatatatgatgatacgatagagaagacggtcattctaattgtttatgcacctagtaacagagcttcaaaatatacgtatcacaaactgatataactacaagaagaaatgacaaattcacaattgtaagtcagataattcaacacccctttcttaatatctgacagtcgtatcgcttcaataattgaaaatagtatctcttcataggctacatagggccatttttacatttgttttttgaattgtctatccatgtccttttctctttgttttgagatttttttgtccttatttccctcaaattttcagaaattccagagttctttatatattaggaatattagtcctttattttttatatatggacaaatattttctctcaatttgtaggttttgttttggttttacttatgatctttttaacatgcaaatacttttatttgtatgtattcaaatctagcatgcttttcctttattatctctggattctgagtcataaggcctttcattcaagagaaattcacctatgttttcttgcaatatattgcttttttttttaacccttagatctctgatcattttggagtttattcttttctatagtattaagtatagatctaacgttatcttttttaaatggctaccgcatttgaatttaatatatggctataccatatattaaaaagtttatctatgccctagtgatttgaaatgctaacttcattatatactaaacttccacacatatttgggtttaattatggactttattctccttgtttattcatttgccattactgtactccatagttttaattacagactttatagtttgctttaatgtctattaggactattctcataccccctgcatttgtaattttctttttaagtatattcctcactattcttgcatgtttgtttatccatatgaactttagtatcaacttgactagcctcatcataaaaacttcggggaatgtgttacatttataaattataaatttataaaaatttaaaaattataaattaacttataaataactaacttcttcatgatgttgagttgccctatccaccaaaaggggatgtcgttttatttgttcagatgtactactgtgtcttttaggattattttaaagctttcctcatatgaaatttgtatattttcttttaagtttactcctaaatatttaatcttctttgttgctacggcaaatggtgttttttctaccattaattatatcctctaattggctgtgctattttctacaaaagctattaattgttgtatattaattttaccacggaagaatttttcttttattataaaatttattttctaagcattcctaggtatgctatcacatcatctgccaatatagataattttacttcgttacaacttcttatacctctaattcatttatcttgtataattgcattggctaataccttcagaaaaatgttgaatatagtggtgacagtgggcagcttggccttgttcctgatcttaagggaaattcctgtagcatttcttcatatgtaagttgtacactttagaactagagtattttgtcctgttaataaataatcaataatatctgataagggtttaatattagcaatatataaagaaattctacaacttgacaaccaaaagacaacccaattttaaaatgggcaaaggacttgaacaggcatttctccaaagaatatctacaaatggccaagatgcacatgaaaagatgctcaacatcattaatcacttgggaaatgcaaatcacaactgcaatgacatatgacttcacatctgctagaatgactataatttttaaaaaagaaaataaaaatgacaaatgtttgttaaggatgtggaaaaattggaatcctcctacattgcgggggaggcgaggaataaattggtgtagtcactgtggaaaacagttttgcaattcctcaaaaagctaaacatggaattattttatgacccagcaattccattcctaggtttatactcaaaagaatgaaaatatgaattcagatacatatatgccaatgttgtgcattgcaccattattaccaatagccataatgtaaaaacaaaccaagtgcccatcaatagatgaatgaacaaacaaaatgtaataacacacacacacacaaacacacacacacacaggaatattattcagccataagaaggagtgtagttttgacacatgctacagcataaatgaatcttgaaaacatgttatgctagttgataaaagtcatacacaaaagggcaaatattatataattctacctagtcatatctagaataagtagattcatagagacagaaagtacagtagaggttaccagggagtttcaggactggggaatgggaagttattgtttgctgattacagagtttctatttagggtaatgaaagagttttgggaatagtggtgatagttataaaaactatgaatgtaattaagagtaatgaattgtacacttaaaatggctaaaactgtaacttttatgttatatttattttaccacagtagaaatcagagaaagaatacatccatttatattttgagtattttatcaaaaatgtgttacaaattattttgcagcttttttcaacattttggagattattccaagactttttttccttagatccataaatataatatattctattaaggaatatccaagcttgcactactggaataattccacttgaactttgtataatctattattaatgtggtatttgattatacttgctcatattttatttagtatttttccatcaatatttatgtgaatttctgcaatttacttttatggtactgttttctcagtctaggtataacgttatagttacttcataaacatatttagaaagtttcctctattttcagtgctctggaatgatttatggagcactgggactatctggtgtttgaagatatgatagcattctcctgtaaaactttctgggcctagtgctttaagagtatttctgtgataactttctttatctcctctatggaaatcaatctctttaggctttctatctttaacagagtcaattttggttatttttatttctctagaaaatgatccacattacattggttttcaaatttatttgcatataaatgtaaaaagtgggatcttttgatttttatatttttctgtaatttaattgtcattttacttttgtcactcaatattttgcgtgtttatgtttttgttttcaagttactgatcaatttagttaaaatttgtattacatattaattatttttaaactatattttgattaaactgttttaaaattatcacattaatttctgctttttatcttcattatttattactttgcttttttctttggttcattggtgagtcttttttatcattttcttaacttataatttaattcatttattttactctgtaattttactgattaattatattaataaaatagaattttcctctgatcaccatttaaaatgtattccataaatttcaaaatgaagtgttttcttcataattattttttagttctgtaacattcagattatatttccccttttatttaacagtttttagtaaaaatttttcttttcttaatttccaggtataaagacctttgattttaaattgtgttaatgatcaaagtttctttatttcattcatctaatctcatcaatctcttttattgtgaagaacatataaactataaactacataagaacagttcgaggctgggattagcagactttaagaacacagaaaccaaaaaaaggggggaagatggtcatctatccacttcacaaatgattaaatccataaataatttctgtttctaaacactttcaatttctctactacaaaatctctacactacactgaatttgcccacctagccaaaatttgaggagcaaaaataaacagtctcaaaacagaatataaagtgtatataattactgcagtatcattagcattaaaaagcttattctttatgggctaaagtaatttcacgatctttagcaaaatatgtaatttggtcattatttccaaccaatcaatattttataattactgcaattgttatagatatgagaaaataagtcatctgatttaaatctcaataataaatagttctagaaaacattgtctcaagatatagatgaaaaatgacttttaatgaatgaaataaatgagaccaaattaagttcccatatacattcaagagaaattctagaactctgtattgcttcctgtcctctcctgacattttcaacctctctgctttcaacctcatctagccttatagcagatgtgctataacactccatctagcacaatgttattttgagtagcaaagaccctgaagaagatgctggccttgagatatatgtattttaaaatgggattaatattagcaatcaagtctcttctcatggtttaagtcaaaatgttacctgaaaatgttagatagatgtattattgaattatacttttccaacaagaattaaagatgcaagatttctgattatgaaggcaaatcaaaactagctcacaaatttcactccgtcaattacttattaaaatacaaaattaaagtcagaaaaaaaattaccaacagctaccaaacaggaaaagcaaaataactaaatgtaataaacctcaaaaactagcaaccaaggaaagaaatagagatgatgtgcgtgagtcaacaaaatactaagaattgtcattaatatttccaaatctggaaagaagcaaactgaacaagttttgttatcttcttcattttcaatctgtagtagaaaagaaaaataagaagaaaaataatatagggaaagtgaaccacagggctatttctgtctgacagatgtaaataatctagtctatacaataaatctggtcaatgatccaaaaagtattcttctgaatgaatgatagaccctgatccccattcaaattgcaaaatctcagaggagacagctcagatcccaaataaaagctacatgtcacctcagctgagttctcccccacatctacctcaatattttttcacccctgagaaataattttctccatcttctaaggagataaggcaaagaggcaaccaggaggaaataaatacaaaaatcctggaagaaaaaaaacatgatcaagaatataatgctaaagaaagatgtcacatacgaagatgaaaaacaggtagatacaaatgttatagaaatttgggaatactacactcctaagcccttagggggctgtaagaagagggccttgttcttaacaatgaaattctgccaactaaaagaaaaagtgaaaaaaagtcagaaaaagagaagctgtggtaaaagaattaggagtgatgactaaattcatatacatatagaataaacattgaacaactatgggaattataaatacaaaaagaatgtaaatgttataaacctaaacaatgcaaaagtaaaataattaacaaaaactgagaagtgggcagtagagatttgggagaaagtgtataatgcccttatctttcaaaacagaaagccaactgtttcttttaaaaataaatatgtagcttttataaactagacataatgagaaagcctcttaatttttcataatgtccctcctctccagtttttaagccttaagggaaatcttttagcaaatattatccctaatgctaaaaataaacattgatttgggattcagcaactcctctaattctaccttggtttcttcttttctataaagtaaaataaaatgtatcaatttatatttagatagcatctacagtatgaccccatttttacaaaagcctttccatttgtccacccatccatatgcccactcacttatccttccatttgtataaatgtgtaagaatgatatctatctaatattaatgatgttaatttctaggtggtggtattaatttttctatttttaattttcatacatttctgtattgattctttctcaaaaggatctttaaaagaaaaacaacaattatttttctttaaaaacacacagaggtaaatatgcaaagagattaaccatgtttagtgctgggtagcaagaagacaaatgattattcccctctttgcacattcccacatttgttaaattaaaaacaaaaggattaaaggcgctgtattcatcatgctgcccaaaaatgaagttattcctcagcatagaaagtgatacaaaggtcacaatcaaacttgttcattcttaagtattttcagacagctaacccaaagacaatacgtgaaatctcaactaagagatttcccctaaataaattattaggccttttggctttgtgtaacaaattctcaccttattattatgtcattaagtataatagtatgcaggtagcctaggcaaggggcattggacagctatgtcttactttttaaatttccctattacttcagaaaagaaataaaagaaaaaggaataaaagactaatggatacagaggggcagaatcttgaaaagtctagaatctaagtaatgggtatacaagggttaattataacattctttctagctttttgtacacttgagttttataatacattttcttaaattccccttacatattacacaaagtaaggattcttcgcaattatttcataagctcatctttaaaacaaaacacctcttaggagcccgaggcgggcggatcacgaggtcaggagactgagaccatcctggctaacatggtgaaacttcatctctaccaaaaatacaaaaaaaaaaaaaaaaaaaatagccgggtgtggtggcgggtgcctctagtcccagctactggggaggctgaggcaggagagaatggcatgaacctgggaggcggagcttgcagtgagccgagatcgtgccactgcactccagcctgggcgaaagagcgagactcagtctcaaaaaagaacaaaaaacaaaacaaaacaaaacaaaaaaacacctcttcctttggggagttaagccaattggttattaacatcttattgtgaattattttaatcgaatttaaaataccttaatcaaatatttttcctcctatcacctaagatcacttatacaaagggcctatttgataagggaaaaggaagcataggtattttagagaataggacatttcagaaagggtagacagagatagcaatagagttggaattggagtagcaacttacacatagaaaccatatatgcatttgttttcttggaaaacttatctagctttttgttatcacatgtaataatttcaagtacttcttagctttcctcagatcaggaagtgaatatcatcttagacactttattacaaaggatcaaaaatataaatagattcatattgtaatatttgtagttatctgggagacttttcttctctttttacctatagtggaataaatactataacagtttttgagtatctgatatgatagcacttgatataatatgatgtacattaaactaagtactttaaatatatgaattgcattaaaatatacaagtatgtagaatgaggtcagagaagttgggaaacttcctcaagtccagatagctaatatatagtagaagtaggatcctgaccgagaaagtctaagtccaaacttacttctaccactttctgtaaatgtaactcaaaattatctctaaagagacacaaaaatatgacttctcagatttgcaaaaatatgtgcaagtccttcctcagcaaagttagagattctgccagaaaggtagaaactaaacctaaagaccttggctataagtgtagccctgtaagagactaggttggcaatgaaaaagccattcatgattcccttctccttcaactgctttccacttgagaaactggaaaatcaaaacatttgcattactagtctcctttgcagctagggtcattagtcatgtgacctagttctagataatgagacatggaagaaagcctgctatgggtcttctggaaaagaatttttttaaccttgattacctctgtcccccaaataaaaaaggtataaatagaataattcttcgtcatgcaccatccactgctccctcttacagaatgtgggcctgctgcgaccatcttataatgataaagggaaggccagaggatttgcaggaatgcaatcaagtcctaacattgtcaacctcctgtacccataccagaaaccacttaccttcagacttcctgctatgtgaaaaaattaaacacctatttctttaagctacagtgtgttgagtattttgttttatttgttttcttttgttgtggatacttgcatcttaaaacattcctaattaatgccagttttagcacctaataattttgtcacctgaagtataactgaaccacaatttcttcatttgctgcaaagattaaatgaggtaacatttttaaaacacttagcttttcacacgcagtgagcattctagtaaaaacagtttaatctaagacataaatgctcaccatgcctagcaccaaagaacactttagtgggagaagctatatatgttaaacattgtcaccgaagaatccttgctctaaggcagattacctaaggggcatgagaggactctgtgctatggactgaactatgttcccccagaattcatatgctgaagccctaccctctaagtgatggtatctggagacgtggtctttgggaggtaattaggtttagatgagatcatgaaggtggggccttcataacaggactattgaccttagaagaagagatctccctcttatccctctcactgcccccacccactccaccatgtgaggatgccaggatgcagggagaagacagagatcttcaagcaggaagacagccctgacaaggaaccaaatctgccaacacctcaatcttcaactttcctgcctccaaaactgtgaaaaataaatttctgttgtttaagccatcctgtctgtggtattttgttatggaatccaagctgactgtaaacactgtgtgatcagctcctgttacaaagaagcagatagaataaaaagaaaaaattggactgcacaataaagtctggtatcttccacaagtacttaacaaaagataaatcttcataggctactaaccttccatttacccctcagcctatagctgctccaaagactccacactttctttggatcaggagtgaagatagaaaatcccacattcgtttatctttctttcctcccctgctgggggattggaagtgtagcattcactttacagtcaatttcccttatagtttaatatatagcaagataattaatcacattgggtttggagttattcaacgtggtttcaaagtaaggttctgcctattattaactttgtggccttggttaggccaattttatcatttacaaagtaagaatagtatctacatcatagagttattgtgaatactaaatgagatcatgtattaaaagcacttggccaatgcctggtattacagaaagtacttgataaaagtcacagcctatatatatatttctctcttagtgattgataggatcaacaatgaacaatccaggcaaattttacctaaatcttataaaatgttaagttaccttatctcaaccatttaaagaggaaaaactgactttcctcttttgctactactatttagcctagcttacttccaaaatgccaaataacgtttttttaatttttaaaccaaaaaaaatgcagtttattctgggtaactttcattaaaataaaagatcccaaatgaaatctaattattacctacctgagagcattcaagttaaaaacaaatgtttcaaataacccaacaaggcataattgcctaatgagtttattatcctataaacaatacagtaattatgacctatggtacaaacataaaacaatacaagcttctttcttcccacaaatacacacttcatctgatcaaaactatacactagaaaatattactcagagctcatagcgtagacgccaagctttctaacaggccttaacttgcacctgcaaatagatggtgactatttctcttccaagtgaaaactaaatcaagcacaaagatttggggccccagaacaataacatcaagtttagagcttgattaaaaaaaaaagaaagaaattagatagtgaaagaaaacctgaagatgaaaataatgtattttatcaacttgaacatggatgaagagaaaacctacaggtcactttaacagtaaggactcaaatcctaaatgacagaaaattcttatagattattaaatgaggctagaatatagacctagatctaatggggtaaagaaaattcagagggcttcaaaaacagaaacccaaaaagaaaacaataaccatccagttgatcaagccttcattttcctattcttggatgtataggttcaaatggtaaatgatgagttgatgccacagaggaaaaaataggtacaggaagactaatgtgaaatgagcaaaaacactaaaaagcttatgtgagtgtctttttttcctcttagaatttctgtctacaacgaaactgcaggactcttgatactttcacaagaatgctgtaatttccacactgccattcttttactctgaaaagcttaatgtatttcagtaacaatgaaaaagtcccactattgaaatacaacagtggatacaccctaaatgttaccaagggaatgaaaagaaaacaagtccaaaggacaaaaactggatactataaaactgagatataaagtcattcaaattcctaagaaacttgtttttggatcatatcaagactttatatgacctcattttaacctatacaaggcaaaatcatatgacaaattttgagaaatatagggtaaatcaataattctcttcctccagtttttagactatcttttaaaaataatactatttaatatctcactttcatatttcaatttctgaagagtttggctattgtgactatatttctttatatgctaaatgttgcagcatgtatttgaatttcatcttcacaattacaatgttgcttattaaatatttttaatacagagtccttgactaacttcaataataatatgccttgggaacatcagagaatcagatgaaaacttacattttcaaaataacagtattttaaataagatatgctaggtaaatatgctgaaagttagttacaaattgcacaatttaagtattgtgcaagaaaatacacccaaaacctactttcacatttttatttgatttagtttttgaaaatcaactttttcttaattcatgaaaacaaaagtgccagcttagttaatacatattttatgcattatagcttgattactgagtaattaaattgtataccaatgaggcatactaactcttgaaaaatctatatttggatgctatactcagagttttcttaagataaattaaatcagaaaagggtgaaaacaatttcaaaatgacccaaagcttcagtccacacgtcatttgaaaacaaagtttttcaatggtaagcaaacaacaaaatgtatcaagaaatgacttaatcaaaaaaggccatttctttctcaatgcttgactccattagtcttattggccaaccatggacatatgtatatgttttcagtgtatgcgtaagagtcaaatatttccttggagatgtcagttttgtcgaaaatgcagatacagtaattttgatgccaaaaatgatatcaaatttgctttccccacaaaaattttggattttgtccttgatttatcaaaaacagagacctttgtgagaagggaatgactcaaattggttagcccaccaaatttgggcttaaataaaatagaaagttataatactttatttgagctttttttttttttatagaaaccgtatgcatgactttcactttctagaaagtggttttctcttgaacacacatcagaaccattcatcataatataattgcaagttgtcagtcagggccgcacccttcactttgtggcaaaccgccaacacatctgtcagaagcactcataagcttccgtgtgttattgtaatcctctacaaagagaacaagctcattcaccgatttcacattttccaaacaaaacaatgacttcttaaaacccaatccaaatcaaactgtgtttccctatagaccatgagctactttctcaccaaatgactaatggcaccagtagttaaagagaatcgtattatcttgtgtacggttgaattacttatgtgctagacatgcatttttaaaaacaaagaaaggtgttcatattgtatggttatatgtatgaatattcaatatgcatatataaggacactgtaataacataaataacatactatttcaataaattcctttgccttaattatcgttttgtcatataaatactacatattgatagaaaccaaatccattttagttgaaaacaaaatgtactctggagttatagcagatcagtacaattgtcattaatttaaatcatccctacagtctgaaagagtcagccctcaacaaagtaggacagtagaaagaggataaacttccttgcagctacacgagagttagagtttttctattcactctacatctgcccttccaaagaagtttccaagtatcagaagtaaagcctaaaactttattaccaacagaataaacccctttaaaaaataaaattggatccaagatgtcaaatgttcagaagtcatagcttttcaaattgcttttggtcgtgtatgtgtcacatatatgtgtatggtcattgctaccctgcctgcatgctctctctctctccgagtaacagagaccccaaaatgctatgtcaaagaagttttcgtacatttatttgaatgaaagacacatgaattaccattgaagatatgagtatttttcccacaagatagagcaatctttacaaagacacacataaatatttatatccacacattatatacagatgtatttcatttttcctactgtatttgtcagacataatcaaagctttcaggaatagtggaagtgattggaacaaaatctccaaacctagtaaaactttgttgattcttagtaatcaataacatacgtatttaatagaccctatggtgactataaaacagattccatattaatatctgttaatatagtacttaagtctggcaagtgatttaaacattctatattatttaagcttcattaaatgtgttatttaatgttgtcacctaggtaataacttcccaatattataaaagattcaaaaaggttaagtgattttcccatgatgatacaccaacgcaaattcatatcttcagattccaaaaaagtcatggctttattatgtgtattttcactgagttatacgaacacacaaatataaacgttaacataaaagcaagttacataatattagacaagttatatacacaagttattatatataaaatcacatatatataaaatcatgtatatatatatatatatatatatacacacacacccttttactaaaaaggacaatacagatttaggaaattcaggacatacaatgcacactagatgcaagaaaaaaaattaatttgggatactttctctcataaatctcagtaagtttaccacaatattttcatatattcatttctcagtcaaatatatagtcatgaaactcaaataaaatgccttatatctgttcccttccattgaggtgaagagatgcaatcaaataattcttatactaaatattataaaataataataaagaatatgtatttgatgaaaggataatgaaaccatgcctgccagtctttattggaaagaaatacagatattcatttattttacttttcatcaagaaagtagttaagttttctggactcaaaataaagtttatttttaaaatgtttacaagtttaattattggaacattacatacacaatgaatgtgaagtagagattaatacaggaatttcttgaatatgcaaagtaactctatcaaattggccagctataactgtttcttgatacccactaacttttttaaatttttaagcccagttttaaatggtggttaaaaaaacacatttccatgataagaacatttgatcctgaacagtttttgaaagtctatttgccattttgaagatatataattcattattattgaattatatttattattaaaccatagcaaaaataggtatgaatttggaggttatttaaagaaatttcaaactaaatatcaattgtcaaaatatgtatacgccaaaaaactatacattttgacaatccattactactttatcagctatgaaaattaaaaatatttttaaaccacagttttaaaattaatgttcttactacttgaagtgattatacaagcacacatatatttgcccaatattttggcaagatatcaaatacaactctataattgcccatattaaaaatgggagaatcaaaatttatttggtgagagagagaaagggagccctatgagatgtgagtatatatatatatatatatatatgtaaattatatataatttgtatatatatgtaaattatatataatttgtatatatatatatatatatatatatgactctgctgagggtcaaagccaaatataaaaatgaaaacatttattttggtgccacccagttcatatcaattgaatggcaatatccaaaccacatttcaagtagtagatgactcaaatagtattcatgcaagaaacaggctgttttcagtatctataaacaatcataaacaagaaaatttgacaacctacttttaaaaaataaattgattaaaaatattaaaatagaaatatatatcaaaaacattgcatagaattcttgaatgctttcataataaaaagtagatgattttatgttgtacaataaaattgctcaagaaaattatgttcaaaaggtgaaacaataaattatcccaaataagttacctctagatagtttatcagaaaataattttctttaaaccataattttcaaaagaagttagaaacacatacataaacacacaacactaacataagaaaaccctttgtaaaacactaaaagattacttctgtggctttaattttatttcaattaaaggtgctaaaccttattaagaacatttttatttttattttgtgttcttaagcactacatagcaaaagaaattatctcaagtgaaggacacaaacaaacctataacaaagaatgattatatttaccatattttcttgttatgtcagagaggaaactctattcaatgctgctaatgttcgataatttcagttactttttaaaaagttctctagattcatgttattctcctttcagcagttatggtttaaaataactaaggtactccagaaatcttgaaagaaagacttgctgaaaaatataaaagatgaccaaattcagagtataattatgcacagtttctaatatcaatatttaaataatgtgtttacactattaataatgagatagaatacttctttcttcttacattaatatttagcaagaaagaagtgttattttcaaccctaaaatgttaactccaatcacctaagactacagataccttctctctcaagtctatcaagctgcttctgatatctcttacagtagagaactgggtgttcatgctaattaaataatctaactaaaagagttactacattagtacatgggctattaattttcatagagtttatgttatttgctactgaacataatttagtttgtattgcttcaggaatgatttaacaatttgcaaatgttattgtcatttgtcaataggcaaaaatatctgttgaaagagtgttctgacagagtacaagtaaacctagttttactgtacgtggatatagaatattttcagttttacacacttcaaagaagatgttttagttctcgtaccatttactctacatttcccttcttattcatgcttctattatatagtttaacatattatattaatataatcttttatattcactccccaacagatatttattgatcgccttttatgttctaggcaatatgctaggttctgggaagaaaaaggtgaattaaacaaacacggtgcccttccctggttgagcatcagtttactagggaatacaggtacatcaccaagcaaatgcaaatgtgttttagaagagctatgatccaggaagtgtgggtgcaatagaaacccacgtatgtcagtctacccctacgtccataccaaacccacccgctactatttcccttgtgagcctcttctggtaaagctgtattttattcaaattcttgtcccatgtgcctaccactgtgctcatttaatctgcttggtattttgaatgatttttcagtaataatgaaacacatgtcctaaggtctaaacactttcttatctcttcttatttatgaccattggcatataactaaggtacattaaaagcacatagtatatacttcagttgcaaattagattataaattataattttttagataaaacagactatttctaggttttattggaagggcagtatagtcaagtgagcctaactggacaacagatgaaacaaacctgccagttttctttcattaaatataaaaaacaaaataaatgacattaaaatatcaaataactagactacaacaaataaaatgctaattaactgaatgttttaatattaaactgatagaataattgtaaaaaatatttttaaggcaggtgcagtggctcatgcctgtaattccaacactttgggaggccaaggcagggggatcatctgaggtcaggagttcgagaccagcctgatcaacatgaagaaaccctgtctctaccaaaaagacaaaaaattagctgggcgtggtggcacacgcctgtaatcccagctagtcgggaggctgaaacaggagaatcacttgaacccaggaggcggaggtggcagtgagtcgagatcgcaccattgcactccagcctgggcagcaagagcgaaactccatcccaaatatgtatatatatttatatatatttttagaaggaatttaaaaaattttaaatgtcagggtgtttttcaacatgccagtgactgtcactgtgcttaatatgcaacaagagctcaataaatgtctgtgaacgaatgaatgaaaaattcacccaattttctacactttctattatgctgtatcctatgatcatcacaaagactcagagatacttctgagatgttgcctgatcctaaatcaataaaagttatttcaactatattactaatacaaatgtgctatggcaggaaaaccacctaaagtctctgtaaatgttttcaattgatacggaagcaaatgagtcttctgatgaaccctcaaatataatatacatttgtttgtattttccattgttagaatttcccaagagaatacatatttggcatagaaaaataaaatgaatacgtttctattatatgccttataaaatgataagatacagtgttccaaggtaaaagtactcacaaattcaggaaactgagcttcttgaaataaagcaaaatatcatgatttttaaagccatataaaatgaatatccagttgttgtcttatttcttgcctctggagaggatttccttctcgaataagagaatgtcttttacagatttccagggtccacggtgatattcagaataagctgctagataaaagcatctcagtgtgtactgggatctatgcaacttagttttgtgtctaagcaatgactaacgtcattgcttaaagagtctactgaagttttagtcactgttgctgacttcccaacaggcagacctggcagcaagaaattcttagtacatatcaagaagaagaggaatgctcctggacattctatttactaaactgcaggccaaattgtcttaagatattactaatatataactaagagatacagcatatccttcaattcatattcagcatatatatgctatatgctctctctatatagcatatacttcaatataactaagatatcttttaatatgatgatcactgtgttcagtgaggtatttatgagtcacatgaatttttatgtgtagtggtgtcttataaaaaggaaatgctagcagacatattttggaaaattgtgcttttaccattctcttctatttcagtgccctttgcctattttctatcttccaattattgcagtcctgtgctcatgtttcatataaggaatataaatttaaactattaatatctgttaaataatagtagcagaaatttgggtttattattttttgacatatttcatgatttatattttttaattaaactttaaccaaaaaagtggtagaacagatgaaatatttatgattgtttaagctagatgataggtccataagggctcatcatactattttctctacttttgtgtaggtttgaaaatttttccaccataaggtttttttaatggaagaagtttgttatgaaaaatgctagaaaaaaattaaatttgacagttttttcaaagcaacatgaaaacacaaatatactttcctgttgctgttgttaacatagttatgtagatgaatctatgaaatgtaaaattgttgttctgatgaaaagcgtcactcaagagaagagcaatagtttatttgattaggtatttgggggcaaagagatgctatattgtgctataccatctcttcctgttagtctctccttttaatctctcttctctctgtctctctctctctctctctctctctctctctctctctctctcacacacacacacacacacacacacacacacgctcctcctatactattgctgtatttaaagaacctcctcataccctgaagacattaacaatggtcaagtaaagtacaggccaactgagttcatgcaatcctaataagcctgaaatgcaagttagctcaaagggccccattaaactcaagtactccacctggacactgtgcttaccatgttgaacggaaacatagaagaatagaaaaaacactgaaataagtattaagtgccctaaagttttactccagctccccatttaccagctattcaatacattaatcattaatttcctcatttctagaatagcataagagtatctgtccttccttacactcaaaatttttatgaggctgaaataaggcatgcaaaagccctttgcaaactgtaaactatgtacgattagagtattattaacttaacaaagacccagagaattcctggtatactcatttatacaacaaagtcaagccattacacatttgaccccacactgggaagctttgttgggccttgggtaccgtcaggtggttcctaagtttcccattgactccaaaatagtgagcagggaagaagaaagatgggttgtaaatgaaatttaaagtatatttaagctcacatacatttaatctgcctttgaaaaaagagaagggtggaattgagccaaacttcctagtaacattgtctcccaccttcatatatatccttcaggctttgtgctgcctttcatactttacaggtacactggctattcattaacttgatttcacctgaaaaatgttcaagagagggagtagagaaaaggcaggagtacagtgtgaattctcaagggtccagtattccctggaaataaccccgattcagaagattctcttcccatcatatacaatttcttcaaacccttgctcaactcaagactatgctaaggcctggtctttcaatatatttgagtttatagttatcctactctggatcagccacctaaatactttattcaacttctgtccacatgacctggtgaacctgctctttttatatgctttatagtctcatttttaccattcccatcctcataataggatggtttgtgggctttgtgtttgtttacaagggcattagatatactaaatatgagaaaaagcagtatcagaagtagatatctaagtggagaaagcagatatgttctaaagctagaattttcttcaaaccactgaaatgctaaacattggtacattcaaatatactttttagtaagatattttagagcccagtcattcatttattaaatattctaacatttatggggacatgctattaatatatataagcctatgagggcttgtcaatgacataccagatagtgaagtttcataacagttcagttaccaaaaagtacacctttgatttctcagtactatatgatgtctctatgtagaagttatccttggacaaagagaaagtattttatataatactttcatttccagaacacattcagagatctacaatcctgatttgtctcaaacctatttcttagtctccattaaacaaatcatatttaacataaatatatccagtatacaatttttcacaaattaaaatgaaagctaatttctgacctttgttttttaaaattctaatccacaaactgataattattcaaaggtcagataaaataatataatgaattctgggcacaagatgtcctcatattaatgaatttattgagaaaaaaattaagtaatggcaccaaaacaaatggcaagaattaaaacaaaaattttaatttaccaagaaaaaaattttccattagctatttgtatagttaaaaacaattattactccctactaaaatcagttacatgaagtaaggttaagatttttcttaacagttttaaacaagatgacctattagggaataaaattaacaatttcatacaactccctggttgtatgaatagaaatcaaggtgcaggatatgtgactagatctgtgcatatgaagtaactgacaagtctggcacactctggtagcttccataacctactctttgagcatgactacctcaggattttcatctcttaaatagctaaggttttcagcaggcagtaaataatgtgcgttcaaaaacaactgaggtatctcacttttatctttctaatcaagagtcagattgctatgcctaaagacattttctgtcttcaacttaaagaaatgaacacgtcagattagataaaccagacagctgctaacaaaaaacctaggtgtgccttttgatttactaaagcccagatgcatccaaatcaaagaataaaaagagcacataaatgacaaactcctagaaaactttctaggtgcatctgggctttattcgcagcctatcaattctgtgtctgacaaaccagtccaggatttaaatctctgtaaggaataaaagcagaagttgattggcccagagtaaaatgtggtttaacatgggcctaaagtccacctgaatacactacaatggctacgtcacaaagaataccaatactcatcttcaagaaaaaaatacagtgatgaaaatggacttcaagtattgctacaatggttctgctgggagctgaagtctaattaagatgattagatataaagtcttttaacaaaaagtcttttaacaagcataatattaataaagcaaaaaatctgaaatttcctacacctgcaatgatttccatgtttccatttcaactgccatattcactgtacttgtttcggttactaccctcagaatggagttaagtcaacccagatgtactgtctctcagactatcaagaaagtgtcttcctctagggccatgaatcttcatttcttctaacaaacacaaccaaagcacaataagagcactaaaaaatctgatgaaaataaacagctcaaaatcaaagagtaaataaaatagctttcaagttttcttagttggtgaattatttccatctgaaacctatgaaatcatccattttatgacacttttaatagtaatatttggggttattagcatgataaacttctcacctattcatcttttacttttaaaaatctgctcatcttatgactaacaccttggcattcaaacaaatactatgctgagacagaaaaaaataaaacctgtataaatgacagagtgttcaaccatgaacacattgtcttttatgaatattataatcacagaatcaataagcctacaaagaaaaaacaggacacaaaacgtgttttgtcatttctgacgaagttataaaaacaacagacattcaatatgccaagtgttcttcaatccttcataatcatagccttattgaagtgaggacaaaaagggtctaattgcataggagcaatctcaatgtaataggttatacacccaggcactgctgcacaatacaacaaaaacaacgttccctgtgtatagcagaatgtcatctctcattttcaggcaattaccttctttcttgtcaacagttttaataacctccatcatctctaaaagacttttgcttcagttaaataattttcagctttttaatatgcaaatgtgcttgttcatatgcatgggtgaagtggcactgctacttgaaatgtgtcagtacattgtggagcacctgcacctcggggaagcttgatttaattgacacctaatactattcattattccacttagtgagcaactcctattagtcacctgtaggttttcctataagcagtgctttggccaccaataaaaatatgaatatttctataaatagaatgttcatatttagtaaatggggttcactactgtcagagctttgggagaagatagggggataatatggaatcaatagttttttcagcaggcaatttataaacttcctctcatttttctataaatttatatatatatatatatatatatatatatatatatatatatatatatacgaggtgttgtgctgtctggtaaacacaagatgctgttttcttttatgtggctcaataagtaatatcctgctcaatataatgaatgaataaataaataaataaataaataaacaaataaatgagtgaaaggaaggatggatgaatggatggatggatgaaagaacgaataaacaaataaacctaccttgcagaatacaccattacgttttttgttgttgttgttgttttgtgtgtttcagtagggtgttctcaattctaatggctccagcctaaaggtgctatttaaactgagttatttaccataatataggacctacatatgccacaaagttaagaggcaaaagcagaattttgtctataaacaaatatatattgatgtcatcttcttaggtaggcaggtaaattaatggctaaaataatgctattgtgaggcatgtgcgtacacattttaaatgacttcaaaatatcagcgaggagaattataacacatatgggattttgtgtatttgttggtattaatgtaataaatatgtactgtaaatgatgataacttaagtctattagtcttttttgcctttatgaaaatggaaggattaacaatggagggtatgtgcagacttaatattggggatgtttctttaccacatggtctgtgaccttatcatccaggccacatttctttctggcattaatgcatttgttagtcccagaggcttaaactacagatgtttaacatcctgcttatgggcagatcatctggaatacaaagtgagaaatctatactacttattagtatatattatgagtgtaacagagatttaatagcccattcaaacaagattagtgaaaccatagctcaggaaaggaaaagtatcatcttaactcagatatgttatcaaacctgtggggaaaaacaaagaagaactgaaagtatattttcagctggaatatgttttaggacatcaaaagaaattgccactaattaatgttgtttatataatagcataagaaacattaattatatccttcaatgtaaacttaaaacctttttatggaaaggggatttataagtaaggtggtaatctggcgctttggaaggcttatctacaacacactaagagcgatcataaatcatgttaatgtctagaatccaaagaaaagtgaggtgatagtgggaaaagattgagttctcttaacccctaggtccaatcatttctatagaataagtgaaaaaaagaaagcagtggtcaactagacctttgttggtatcccccaaaatgtaatctctaaactgaagaatggcagctggcagaacagctggtgaataggattaatgtcagaagaaagaaataaaactcaacatatgtccaagcctgcggtgctgggactgagcatgattataccccgacggataggctgaatacagctggaaagtgccactgtgccatgcttctctacccgacaaggtcatcgctaagaagtacagctaatgtctgaacagcaaactcaactttgtctgaagaacttggtaactggtacagagagggaacccgggtttttaaccctaaccatgcactgaatagtttaacgctcggtgcttagtttcctgtaccacaaagcaaaccaaaagacagattagcattgaatctaacagattgcactaaagtaaatataatttttaaatcatttaaaccgcttaatctcatctcaatcacatcaaatatttagagcaaacatatttccatctttcatttagagtttaaataggcacaaaggagaaaaaaatctaattaaatatctaacagtagatatgcttttgtaaattgtcaatgtttttccaaagttaacattttaaaattactgaatcacaattagcaaaaatattttaaagcagttttttatagtacagccatcatgttctcacactgaataatatgagaaagttttatcttcctgccctatccccatgatgtagttggcccactttagccttttgtaatagtagatgagagacaccggaatttaactgttggaactagctacagtgataaacagcaaccacgtggacattacagatagatgagaaaaggctttgttatttatagaaacttaggcagcataaattctgtccaattgtttccttattaaacaactactgtaaacattttaaaaagagatcagtaatcatttctaagagagcactgccctacttgtttctgacatttatttccttcagatgccagagctaacttgagctcaacaagcagattatcagaggcaacaaatcaccttcccatctaaaaacagctagcactctcactacattcttttggcaacacatccttaagtaggggtgggagtggggagagggagttagagaattgtattacaaaagaaaagaatagagatgtgacttttacaggtctaagcacagttccacagtctcaagggaaatttatgtgaaattacaaccaaccaacaaaaatctacctaaatagccactctctgaagacatcacattttatttctcatatccaagattagtacttgggggtcaccgcagtgagagacgaccaggccctacatctcctctgcttgcactgttctgaggctgtcaaaaacccagagcaggattattctctacagtcaaatgtaaacttctcaccaccttgcttattttctttttctctttctacacataaactaattactggcttatatatgcattatggcagcatcaattaaaaaaaaagctccagaaattaggaaacaaaattttagaagttttaggtaagcatgctaatggtttgaaattcaaggggccaatcacgcttattttctttcttaaatgattttcaaataagcatggccatatttatgcaagaggggcttcttaccaggtaagatactcaatggacccttcaaatgacatttcagataattcatcaggctagaaaaattgccatatatcatcattaatgtaataaacagtaaatgtttattacattaatatcaggaattattatttttaaaagtcttgagcttcactttgtgtacatgccagcttttacttagatctaggagtaagtagcaactttcaatgcctttgggcaattggacatcgttattttatttctaaatttttactgacattttaaaactctccttggtatttggaatttttaaaatgttaatctggtgtggtacatagctcaatgaaatctcaaatcatcctacattaagtgtttaacactaaggaaatagtcactatttctggaaaactcaaatgctagaaaaatctatgtatagtccaaataaatatttaaatgaagttgccagttttaatgctgttataatggctactaccaaccattttataaaattccaagattgcatgctttgaagtttaatgacactcaacattttctagattctttaaacactgaaaaaaattgtttttatttgtcattacagaatatggaacataacctccatagcttattaatgtcttctgaattgtttaaggggatttaaagatatgagttaaaagaatttcataatcttaatttcaatttctccttttcatttaatagtagacattcattaggacccacacactgtaataaattataataatttcaaacaagaattaaattactaggtacctagtgaaagagccattttttcttaggtaccctgtaatctaactgtcagatttaaaatctattcccaatcaactcttcacaacattcacatttattcatctatgttaaattaataaaaggtgtgaataatactgacaaaattgatcattattgttcatgtagatttagaaaattataaggtaatctaaaatgtaaaaggaattgagagaaactattaaggttcttataaataaattcatcctatgctattttttcaaatcaagactgaaagttctacgagacttatttaaattaactatacaaggtatttgataaattgtgcatttttagagcataaaccattttcattatttttgacaaataccagtacaaagactctactacagcactagggttcaacaaatactttaggaagctatgccaaaatgatgttgcaaagtaaaacctaatagcaatctgagacagtttatagcagtttgatgaagaaaagacacaatcacaagagaacatcaaaagcagatagccatccggaaataaataccaccccccctcatctttcctgtagatatagtaatggaggtataattcttacctggactacaaaagagaaatacaattctattgactaatgtcccaaaacagaactcccttcacaaaacaagtttgcacacttactctatttcctaccatctaaccttgctgaccccctcctctttaactggcatccctgaagataaagtaaaacatgtcaacatctgttcccattcacaccgattttaatttaccaaaagagctttgctattttcagagcagactccagagcacaatgacagatttagggcctttactggggttgcatttctagtgtgtcagcatttcctactcactaagagtaaattccagggggtcacaacaaaggaatagctgaaattcaaacttcattatagagatttttcccacccttacttatttcatcacaacttaaactaccaacaggctatcctatttagtgaggcatcactggtgctgcacagtaattggactaaaattatctagtcctggggcaaagatgaaggtcctttaggcccttcctatggagttatacatacataattacctcttccagaactttatatctgattgaaatttaatcaccataatataacatttttataactctttaaatttgtaaaatagtatatgctttttaaaacacttccacatccttaatgtctgtttcataattcaattataagtactgagttttaagccacaattattctttccaacctaagaattccatagttatgtcttttttaataccatgctttactcagatattttaaatgtgtataaagaaagtcactctcacaacaccccagtttccctagataattcagtttttaagacacaatgtgaagagcaacttggtgaaacaatgcacaagttgtgttgtaatcaaataacaactaagacatgagcagctgagcagaaggaagatgggcaacggaatgctgtacagcaatcagcactgttgactaatcagaatttgagacactagaaggtaataagggtattataaagaatggcttattgaaggagcagctgtttatgtgtagctcactgtttaaatgagttccactagattgccatggtatgttttggtgaaaatgtttaactccttttaaaatgatcattagagaagaaacggcaagtggcaagtttggagatatcaaaacaccaactaagatttaacagctttagaacagttatctgggtggtttgaaaatggtaggaaatgcccatttcaatgaccttttaagtcaaaagtacttaggtactcattcttctcttaaaaaccttagaagttaggtctattccactatcattactgggtaatgttatgggcacaaagatgaagcagaaatataatagtggaatcttcagaggataagaaaaagaaaaggcagagtaaaaacacccatcaggacagccacaaattaaagactgtcttcgaatttaaaatgtgtccatcttctcaataagaagaaggaataagatcctgaattatatttcaaaataaaagttttacatatttttgtattaaatataatacaaaagccactctcctacaatgacttacaagaagtaaataatttttaaagcagatgagagagaatgcaaaataacatttaattaactaatgttactttcataaagtaataatcatcttattcaaaactatttgtcacacagttgtgatagctttgtaattggactgatttacagttttgtcttccttactttcacccaagaagcaagtgtctactgtttcttctgccccacaaaaaaaattccataaattacaacataaatgcaccaaataatacttcactgaatttatcataatatagtattatgaatatttcattttgacaagtgttcggtaatatttttaagcagtcagcaagtggtcaaaactctgctatcttttgtaacagttcacatgtcaaactggcaaagtgcccatattgtaaggcagaaaaaaaatctatttaatgtctgccccacaaggcgacatgaggtttgattggcagaaagcagagagtggcttttgatcatgtgtcctaacaagcagttccagctcctgtcttttcagctgatgggctccacattacccattcaaacagaaatgacagaccactgcactactctctggctctagtcacacgcagtgggagctatgctggagacagagtcactgattaaatatatcactttttcaagacaagcaggttgtctgaatcaaagttggacagaatagactcaacattattaaaaggggatataaaacttggattgagtgatgttcagccagtttgcacagcctcagggattcccaggctgacagggggaataaggaacagcagaactcataaaacagggtcagaaattagctgtgacaccttggctattttcccatcactttaggaccactgggtttcaaaattctggagtctctttttcacttttttactttctttttctttaaatgaattcagtagaggcagaaaaacacataaaagcatgattactgcagtttgtcaattatagtcttaaagggaataaaatactggatgcaaaccctttgcgtcttattttaaaacatactaatatacgttcttctgactgggaccctcattttaaaattttattccatttattcgtttggcattatagtgtaactttaaaatccaggaatattagtcatagaaattatacagttaaaaattgtttaagtgtcctgacaaccagagggctagccaagttctagttatcatatttaaccatcctattttctttgctatagaatgcatattatttaaacctttggcttaaaatatacttaaagacataaatgtctaaaatgtaaggaatttttcaatacaaacttgtctaaatttatgtgttttttttagattctgaatatagcctctcataatctagaacatattatcagctacctatgtgatgcaaataaataaaatacaaagttgtttcctgtttggaaaagtaaaaataagtacccaaagaaataaaaaagaaagcaactatctggtcatagaaactaaggaaattatctgaaacaaatcatttgaagccaaaagatataattgaataaatggtccattcagatgttattctaaaacagtccttcgaagagattttaacttcttcttaactcttatataaagaattagttttacttatttttttttagtaacatactccagctattccttggaacacttatgttcttattattcgttttggcatcactgtaaatatttagtagcagcctgctcattagatgtttaagatatgattaaaagattaaatactcctaccaagatgaagatagagttttaatatagaagaataaggaattaagagtagtcatgaaataagatactgaactaatagaggatgaagagatacaagaattgcgtttgctggaagaagatggtaaaattacaaagaaatggtgggtattaaacctctgaaaagcaatattttcttttattgtgttacttatttagttaaattactttaaatttcaaagttaattaacactagctggtatatattggttaaagaatgtatcatttttcagaataatcttaatacaaatagtatttgatttatgttccatataccatagaatatgttatcactgataaacagttccatattaatcaaatatgcattctactgcacgaaaataaagttacatattctctagcttctgcacttcgtgtctttaaagatctttgaggattaagaaaatgatgataacaatgtattttatcccaagtgatcacaggcacgaccaagcaattatttagaaagctggttgttttcaaaaatgttagaaaattagcttgatgaggctaatttgactccttatatgagcccagattttttttataaaaaacgggggaggggtgggaatctttattgggaattgcttcccaaaatctgaaatacagtaaagtggcatttcatgttttccctaagaactggttaatatttaacattcttttttttaaaatcaccacacgccttttcatttaagactggaaggagagagaacaggaaattgctaaaatgaatagtcaactacgataggtaagaggagacaaaatctgcgtatgtattgctaatatattagactaagtaaacctgaagctctgcaaaatatgtttttccctttttacaatccaggtgtaaaaaacaactgtgtattacccatgctttaccacatgggtcttttatattctacaccaggaaaggccaaagaaaggggggagatatccacaaaacattttgcaacaccataaaaaggaatactttcttttaaaaaaatccaaaataattaattattttagccactatattattgcttacagtaatacacagcaataacatttacattgattgaattctgtttccttaatgtgaaatttgtttggggttaattagcacggctgaggaataagcttaataattttatgttgtttacactggaggcagttttccacgagcactgctcagggaggaagtgacatcttctaatttcagacaaaacatggaggtgagggcggctgctcactgtgggatggcaagcgaggcccttcctccttcagcaagcttccccagtacttggggtgtctaatggccacaatacaaagttgttcaaattatttctcaggcatgataagtttctaaaccaaatactgagctgagcagggattaaaaaaaaggacttatacaaatggagaaagtccacaatattagacatttttactgtcccttccttaagaaaaagcaggtctaattagttgtcttcctaaaatgcatacctagcatttttattatgtattataacattttgctcagagctgacatttttattctgacaagcactgtctggagagctctcaataaataatacattgacaattttcagtaaataagcagtggacacaaatcgttatccttacttacagctgccccactctaatagtgcttttacaagtgaggtgactattcagtctaatgcaatcctctcagtgctggaaagacattttcattcattaccacggtcacaagcacttaaagcacttttaagccctgttgcaaaacagcaggaatggcagagcaagtggggctaacgaaaactgaagttcatcaccagagaaacctgcggctgttcaccttaacaactaggaaattcacttctacctaggccacctcaacacttctagatctacatgtctaagaagaatacagagttttctttggccattaaatgttaaagcctgtgggttttgtttttcacattattttggctcatcatccaataatatttattaagcaccataagataagataagggatcactctgtgacctgtgtgctatacctttgatcaaggtacagaaacaatatctgaatccagattattacatctgaaaccacacaataccttttcttttttccctcatcaacttttcttccctaacaatggcccccaacactatcactctaaactagtcactaagccactaaggcagtcctgaatttaattcttattcatgaaatcacatcaatttgattttctagcaatgtgagaaacaaacttatatgaaataagacttaaagaaagaataataaaatgagaaggtaatatctattactccttgacatatacagcctgtagctagtactttcaccctacttcttaatcaaacaaatttatccattatttgaacacttcttagacagttaaccgatcacgaagatggctaaaaatatgttacccagtcagaagtcgatttaatgctaccatattacatggcttggactatatattacagaacaatatagtagagtatatctactataccatagttctcaattgttggtgtgcatctgaaatacgtggagagattgctaaaacacaggttcatgggccccatcccagagtttttgatttagtaggtcaaggatgaagcccaagaatttgcacttcaaacaagctcccaggtgatgccaatgctactgacagtttgagaaacactgggctacaaaattaattgagttcatctgaacagataagctacacatgactcatgttggggctaaaggtatagtcacttcccttattttatatgaatagaatgatagattatggagtttccacatatggaccaagtttgatgcaacaatgttcattgttgcaacctgaaagcaacaatgataatttgaagtgagtatctaagaaaaaaaaattcaatccataaaacgacaagaaaaggagccaatatctcttctaatctccaagtcagtcaatcgtacttctgcctgctagatgtattccaccttcatggaatactcaaacttggtatatctaaatgcaaaccttttccccaaaccttctcaactctctatattcaccattctaatagccccaccattaaatctctcagctagatatctccctaacctcacactccactcctaattagcaacctcaactatacctcaaacagctgattccttctctcttcttcccctgccattgccttagtttagagtctgattagtacctgcctggaccattaaaatagcctgctaccagattcccctgtatttgcccttgcctctttccaactgatagtcaaaatgccaccaaagttacttttcttaaaaaagtgttcaattatgtcgatcatcctcctacttaaaagttctcaactgctccccactacccaaaggataaaattcaatttctgtaataatggcttcaacatattgtttcagttgtgtctcctgtcctagtcacaccaaacttcttcacattcattaaactcacaggtttattcataccatgaaactttgtacatgctgttctctctacctgggattccattatatctcttgttcactatgatgagcttatcaaaatctagctcgaatgtcaataaatccctatttagatctagaaaaaaattatggtttcctcttctatacttctacagcatttttttttctttttttcttttttttttttttttttttttgagaggcagtctcgctctgtcacccaggctggagtgcagtgcacgatctcaggtcactgcaaccttcgcttgctgggttcacgtgattctcctgccacagccgcctgtgtagctgggattacaggcgtgcgccaccacacccaactaatttttctatatttagtagagacagggtcctgccattttggccaggctgatctcatactcctgaactcaagtgatccacctgcctcggtctcccaaagtgctgggattacaggcaggagccaccgcacccggccagccacagtacccagccaacacagcattttatagcttcttctactattgtacttatgataattaccttatttacatgtgtttcctactaaattatgagctactaaaaaacaatatttatctctgttcatcttcttctacccttttctccacttttacttctctccaacccaggcccactacaatactgcatgaaaaagcttaataaatgattatggaattaataagcatatgtatgtgtgtatttaaatatgtatacatatgttgttatgtgtgtatatatgtatgttttgtttagatgaagaggcattctctaaaaattaaagctattcatctccttttaatcataatattatttatctctctgaaaacttttataataaatcaacagtattttaggttaatgtatattatatgctaagatccataacaggcattgtgaagatagactaaagatatggtatgtgtcctcaagaaaattaaaatcatcttgtgaggcaagatcaataaatgtaaaataacaaatacttttcatctatgtcaaaatcagttgagcatatttctatggttttatctgtggattctctagtatattccattgatatatgtgactatttttcttccaatatcacattgccttgattactacagctgtatagtatgccttaatacagtattgggtagaataattcctaacactttattcttctttctcaagattttcttagctattctagaatatgatcctttctatacaaattttagagtaagtttgtctaggtatatgaaagtcttgctgggattttgaaaggaactgcataaaacatacagactatttgggggaaaactgtcatttttaccatgttgagtctcctagtacatgaatacaatatgtcttgtcatatttttaggtcttttttcatttttgtaatcagcattttgtaatttcagcatatagatcctgcacatgttgttaagtgcatacctaagcatatcattttatttggagaaaatgtaaatagttttgtggggggtttctttgtttgttttttgtttgtttgtttttgagacggagttcttgctctgttacccaggttggagtaaagtggtgcgatctcggctcactgcaacatccacctctcaggttcaaacattctcctgcctcagcctcttgagtagctgggattacaagcacacgccaccatgccctgttaatttttgtatttttagtagagatgggatttcaccatgttggccaagctggtctcaaactcctgatctcagatgatccaccctcttcggtcttccaaagtgctgggattacaggtgtgagacactgtgcctggccaagttttgagtttttaatttcagttttcatatgttgctgtgttctgaattttgtgtctcccccaaaatttgtatgttgaaacccagtacccaatgtggtagtattaagagatggtggcctttgagaactgattagatcatgagggctccaccttcatgaataggattgatgtccttataaaagaggtctgagggagtttgtggcttccactatgggagaatgcagcaacaaggcactatctatgaagcaaagagcccttaccagacaccaaatctgttggtgccttgatcttagacttcccagtatccagaaaatatcagagaagctaatgccacacagaaagcaataaatttctgttatttataaattactcagtttatagtattttgttacagtagcctgaatggacaaagacataggttcattgctattgtatagaaatgtgaatgatttttaagtgttcgtcttatatcctgtgaccttgttgactcattagttctaagaggctggttttttgttttgttctgttttattttgtacttagattccttggaattttctatatagataatcacgtgatttgcaaagcaattcaatggaggaaggttagtcttttcaacagatgatgccgcagcaaattaaacatccataggccaaaagaaatgagccttgacttaaacctcacaccttatacaaaaattaactcaaaatggattatatacatatatgtaaagtataaaactacacatctttcagaaaaaaaaaaggagaaaatatttagaatctagggttaggcaaagtattcttagacttgatgcccatacttgatccatacagtaaaaaattgttcagttggacctcatcaaaattataaactttcatctgtgaaagcccatgtaaagaggataacagacaagctaaagaccgggagaaaatatttccaaaccatgtatctatcataggactagtatttagaataataaaaaactttcacaacagcaaaaataaaacaatccaattagaaaatagaccgaaaacatgagaagacattttacctacaaggatacatatatggcaaacaaacgtgtgaaataatgttcaacatcattagccatagcataaatgctaattaaccctacaataagatatcagtacacacctataagaacagttaaaacaaaagtgacaaaaccaaatgttgaccaagatgcagagatgctggatcactcatacattgtgggtggcaatgtaaaatggtacagctactctgaaatacagtgtggcagtttcttataaaatccaacgtacaatatagccagcaattgtactcttgggtactaattccaaataaatgaaaatttatgttacaaaaccctgtacacaaatgttcatagcaagtttatttgtaatagtcaaaaactggaatctgcacagatgttcttcaacaagtaaatagttaaacatatgtgatttatacatatgatgcataccatggaatacacttagcaaatttttaagtatgaacttcttaaaattttgtttgtattgacacccattaattggattggatgaatctccagggaagtaagctgagtttttttttttaagtaaattctaaaaagctacatactatataattccatttatataacatctttaagatggcaaaatgttagaagtaaagaacatattagtagttgccaggggtttggtatagaaggtgagggatgctggcattgaagcagggtaggtgtggttacaaaagagcaacacaaggaattcttatgatatcaaaactgttcagcatttgactgttgtagtggatacatgaacctaaataggtgacaaaaatatatagaacttaatacacacccccacacacaactgagtacaataatgtagtacaaatggagagacaagaggaacatcagtgaattgtttcaatgtcaataacctggttgtgctattatacaacagttttctaaaatattaccgctgggggaaaccgggcaaaaggtacatagaatctctctgtattatttcctatagcttcatgtaaatctacaattgtctcaacaaaaatttcaatttaaaaaagagcaaacagcataattaggattataatttattgataaatgcagtggtgtacaggtttgagtattaataattttagaggaggagacattcacaagtgccagtcagtagaagattaggtatgatccggaaaatggataaatggaaaatttcaataaacggagagaatacaaagttattctggataggagggataatgactaagcttgaagtatgttggactaaataactaatcaacttcagcactgtgctgactcaacagataaaaatcttgtcctgagattgttacatcctcaaatttctttttttttttttttctttttttttttttcctgagacagattctcgctctgtcacccaggctagagtgcagtggcacgatcttggttcactgcagcctccacctccccagttcaagcaattctcctgcctcagcctcctgagtagctgagactacaggtacatgccaccatgcccggctaatttttgtatatttagtagagacggggtttcaccatgttggtcaggatggtctcgatctcctgaccgcgtgatccacccgcctcagcctcccaaagtgctgggcttacaggcatgagccactacgctcagcctacatcctcgaatttcttaatcacaatgctcactagagaaagattacaacagaactccaggaaccaaattctaattatgtgcagtgtgtctaatataactaaggaatgtccaagttatatgtttgcgcaagtgcaaaggtcctaagacatgtttaaggaggaggggagtcgtccatggcagagaagagtaaagtaatataaaatggggcttgaaagccagagtaatatgttaggattttaagcaatgaatgttattctaggcataatagaaattgatatcattagccagataccaatgctccaatgccaataaaatgcctaaactctctggatattagataacaccaataagaagcaaaaggggcataattctaaatgactaaagttaaatactgaagttcctgatttacctagaagtgagaccagactttctgctattaatcagggtcaaggcttaagagttaaattaaaaccaaggaataatttttaggactatgtacattgggcacataagacagtttcctgtctacctcttctacttgaaatcaaagaaaaatagttccaaaacatgtggcttatgctttaattcttaaattttccatctctcccctgtccataacataagcaaaatgttcaagataagagatatttctgggggataagctagaaagctccagttaagctagtaaaggcattctggagtgaaatggaatcccagtgcacacagtttgttagccactctttaaaaactgccctttgactataggttactgtcattcaaaaagtatatatattagcataataattctgctgctgttgttgccgctgtaatggtgctgttgcaaataattcaatattttgtcatattttcacagttgttcttcattataccttcatcaatttttttctagccacctatttgtatttactcattttcaattcattatttgagagcaattaggggaatccacagtcttctaatttctgcactcccaatgctagcggatggcatatattctattacttcattgtgagagtacttgtctgttctctcagttctaggtacagctactcagttatacttaaactcaagacatcaactaagaaagctacgataggtctgagcaccacacatattcagctttaagccacagccttgaagccatggctttgtccgtaagtgcttcactggacaatgacagtttcagatatcaaaattggatagaagcttttatctctatctttgtaaaaattctaacatcagaaagaagaaattggaaatagaaaaggacagtttcaagcataatgaaagaaaatgaatcatgagatttattcagtttgaactgaaaatagtttaaaagagaaaagtaatgatagtaaactctaaaatttggatacaaactgtaaaagaaaatcaaaatggcatagaattttacaaattgtcctttaatgcttatctagaccaacatcctcattttataaattaagaaactagtgcttagatcaattaattaattattagacacaacctaataagttaaaaagagttaggataagaatgcacatcaatcccaagccaatatctgtaaggattctcaagttaaacattctgagagagaggtgaaggtttccagctaatgtcgactgtttggccagaaaaatgtctatttcaatataaatggttggctagaacagtggcaataattaataggtttgtaattttgcatttgaagtaagtatttaagtaaaaattattgtaaacctgatgcaattagagatgaggaactactctaattctaaaaccacaccctgtgctggaaacatcaataaagaggatcaaaagggaaaaaagtgtttcctaacaaacctagtaatcacagtccagtagaagaacgacgatattcttgtgctcctagttgaaaggagggctaaagacattcagcctgttgtattcagatacaacaaaaggaaaaaggaaaattgcagtgaagggtccatcaaaggctcttgctgagcttctgaaaagctcagtgatgaagaaaagcctgtactagacattttgaggaaggtggaaccaaaaggtatagacagttaaagctttcaggaattctaacacaggcgcatgcatgcacgtgcgtgcacacacacacacatattgcagcagcaacttctttgtgtaatgttttccaagagagtggaaaaagaacacaaaaatgtgtcaatatcaattccactcctggggaaatgccctagagaagaaacttgttcacatgtgcatcagaagacaggtgcaagaatcttcatatgttattgtttgcaccagcagaaaactggaaaaagtccaagtgtccagaaacaataaacaggagaatatactgctatatagcatagcatggaatagtatatggaagattacacaaaagagaaaatgaatgaaagttcacacagcaaaactgatgatagaatataagaataaaaagcaagtcacaagaggttacagtatgacatcatttttatgaagtttgaaaacaaggctaaacaatcattatttagcgaccgattggaaactattttaaaacaaaaaaggcagataatgattaacaaagttctggcaaaaatgtagataaaaaaacaaagattggacaggtgaagaaaacataagtagattcaatagtattagaaatttttatttagttggatgctgagttcacaagtgtttgttttacctttatggtttataatatacatatcaaatattacataataaataaatgtttacatttaccacttccttttctgttcattttttcttttgatattgcatatatattgtacaaggagaaagaatacagatcccaaaactgtcccctattatttcctgagactcccagaataaattctggagaagtcagtctaatgaattttcaatagaaaaatgcaaaatgctaatgatccactcaacctccacaagctcaaaatcatatgagactataacttatttcataaaaccatcagaaagctgcatcctctttctaaacaacaaaatgccaggagagcaccttctagctccacagttcaataacaggaaaaatcagaaacaattgcctgcatctgttccccagattcttagagaaagaatcttcaaatgaatttttaaatctgaggagatagaaatgagcaagaaatctgaggcatattttcaaggcagagacacacaaattgaagttaagaaaaagattcaaccaaataatatattacccaaactgtaaatggaggttgcaaaacatatagcaaatagaaataacgaagagttgcccagaaggtctggagttcacagaattctggctcattttaagttttttaaggtaatatgagaggaagaccagtttcaaaaaaaaatagaatgcaaatatacttaacacgaaaatagactatacataattcttttcataattcaaaaaccaatagttctagctcctcaatataatccctaaatatcattgtacaaaactttcagaaaatacttgtttatttaaactatctggtactaggtaagtatttactatgaatatgatacaaattttttaaaacaggagcaaggacacaaatattattgggaggaaagattttaaagagaagaaaaaatgaatttaaatgaagttgtatcagcattgttctgaatacccaattgcttctgcaccaaaagtatgagtggtcctgggaaacttcagcatttaaatgacttgaaatttccaatttatttgaaataacaattttgcgtgttttaatgaatacttaaagtgtttcttatgcaaaaacccgaaacctttccaaattttccttttaatgagaaacataaaacaaggcttaaatctgggatattataagtgcttcaccaatataactttcaatcagaatagtggtaaaaacctaatatccacaaattttgccttaaaaattattgtgatgttctcacagggtgtgaatgttaattaaaaaaaaaacatgggcttttaatagattttttgctttaacagaaacacattgctcttaactggctactatctaaaaacctcatccaaggctttaccaacctctctcactgacaccatcacattccacatatttttcagaagggatgattggctttcagtggggaaactttagtatcagcttttccaaatagcctgaaaagagagttaaactgaattgctcttccagaacacaagaacatcattgctgccaaatgctaaatcccttaacaccatgggacatttcctatgattctgtctgtggtacagaatgagattcctagaatatttttcttttttaaaagtttcttcaaataataacagcaatagtagttataatagcaatactagtaatagttataattacagaagctaaatattgtatatattaatatgtcaaatcctcacaataaccctgcaaggcaggtatcattcatacagatttacagatgagggaactgaagcacaaagagattaatttgtccaaagtcacacaaccaggaaataatgctggctacatttattgagcacctactttgagctggcaatgttctaaatgctttagttgccttaactaattattcatcttcatgaaaaccttgatccttataacactgtaaagatactcattttttggttgagaaactgaagcagagagatcaagtaacatgctctatgtcatccatctaggaaatgctgaagtgaaattcaaacacaggcaacctagctccagagtctacactcagtaggctatactgtctctctaaatattaaaacttagattcaaactcagatctagctcaaagacatgacttttaaaaatgaatttcctcattgtttaaactataccatatatctcttttagtagagcaaagtctatcagaggagcaaaacacaacttataagcaaagtaaatatatttcagtgaaaatatatgtagaaatacaaatgattgtttagagatgtgaacaatgataataatccatcaaatatacacataaacacatgctcattcttgtgctgggaaacagctgcataatccattggaaagcctgtcccaccaggaattcaaagctcaaatgctgctgtcccttcttacatgcacagtaaaatgaatccacatacttttattaccatgatagcagaaagcacacaattccactgggcaaatactctaatttctgaccaatgtatgtcctatggaattgtatcaaagcctgcatactttccattacatttatggctctaacaaagagagttcatttattctaatatttctacctaactacaagctttgtcactctctcctaatcacaataattattacctaaagaataagtttttaaaaagagccatagagtcaggaatttagttttattttgtcagacagttgagagttttatcattgtatcccttttcctgcaatctcacatgactccagaacctgactcaaaccagggccctcggcctaggatcatatacttagtagtatgatacacaagacatgatagtggctgaagcactattattaaagagagattaaaacagctgtacattatgctgaagcactcactcttccctttacaaacagacggtcctggattacaagcagcacttgaccatttaaatcacgacaacaaccagatttaaccagctgggccatattctcctaggcagtgcctgttgacctcctcagtcacagctgctcaagtgaaattctcattagacaacttattttcagaagccaaaggactctctgattaaatatatgtatttagatatagaagtcctttttaaagtattcattttctgtcgcttatgttagagcccagctatattggcaacaagacgggtgatacaaggataactaaaattcatcattttattatagctgaagaattttagccttggaagcatcttaacctgaatctattaatcaaagctttcctgtacactctatctaccaatgttttaaaaggtggtttctgacattcaatcattcaatccatctatggatctgtctacctacctacataccaatttaccaatctataatactaaatcaaagttaaatttacaaaagacagaaactttgcctatcttcccataagtctcagtttcagagggggcacttcagatgtagcacccttgttcaacaatgttttacaatctggtcaaatcactgctcaggagagggcatttcttgaaggaatagcagattaaacactggacaatttggttgatcaaagcatctgcctggagagtttttgtttcatcatgcaaatatagtttttaaaaggaccataatgaactttttacagatcagttcttgtagatgagggcaaatgagggagaggtatttagtctgataaagagtaaaaatattctccagaacaagaataatgcaagaaaggtaatcatttatcatgtcaatcacacaggcttgtctctcagctaatcatgaaatatggccctcaaaccatgaagtagatgtgagggagaggtgggtaatgcatttgaagacttttaggtgtccaatgagataatacatcccaaatgaggagatggacctggaactttaaaggatcaatgtcaggcaaatattggtggagctgttatacctccttagacctagaatataattatttgagaagcagaaatctatcctaaactttttaatgaccctttctataattatttctgttctcccattatgctattctatactatgctccaagtagataatcaaaattaggattcaaactcaagataccaaactcagaataaaaaaattctcattgctcccatgtccaaaacatgttcctcctttttttttttttttaattgtattaccacgttcctatttgcccagagtttaaaaattctgagcactctttgaaccattcttctgtcttggtctctacacttaaacattaactcttaacaattctatctcttaatatcttttccatatgcatcccccttccttcctcatttctgctgccttcgttcagcagaccctcattatctctagcttgaaacaatttccttaatgtctctccctgctcccattcatcctaaacagtgcagccagattaactttcctgaaagaaagctctaatccaccaacttattgtgctaaaaaacagtcagtggttcctccattgccttcaatataaagttcaaactccttaggcaagagtcaaagggcctccatgatctgaacacaacctactttttcagtcttatatcccatatgcatcttctttttttaatttagaacctgaactattggccgttttaaagtcctctgcctattctttctgcctgaaatgtttctcctctcaatttctgtctatataaatcctttcattctccaagaccaactaagacccatttccctacagaaccttccaatggcttccaaggcagaagtaatttttctatctagtaaattcccataatattttatctatatagctctatggaatttattatatactagaaactgaattagagttcatttttatatgccttatatctcttactggaatatgaattattaaaagttagagaccattgttttattcattatgggtgtaccatatcatctagcatagggattcttaactggtggtccacagactccagcagacatagatagaattcaaggggtctgtaaacttttgtggaaaaattatttttcactagactgtattgaaaatttacatttccttaaattatggatgcaagtaacaaaccatactgtatttgtggttcctatgacattgtcaccaatagtatcacaattgatattttatattacattatacttggagatatctcaaaatatcttttacgcttatcactatttcaaaattattatactgttaggccctctataagatcttgttttcttaatgcattagtggaatagcatattctaccatatcacaaatgttttaaattatttactggttgtttgtttgtttgtttgttttgagacagagtctcgctctgtcacccaggctgaagtgcagtggcatgatctcagctcactgcagcctctgcctcccgggttcaagcaattcttctgcctcagcctcccaagtagctgggactataggtacttgccaccatgcctggctaatttttgtatttttagtagagatgaggtttcaccatgttggccaggatggtcttgatctcctgacctcgtgagctgcccgcctcagcctcccaaagtgagccaccgtgcctggcctatttactgttttaatatgattcattttctctgtaatctgtgtattttaccttatgcatttaaaataatttttaaaaaaagatctgtaggcttcactagactatcaaagggattcacagaaagaaaaattaagaatccttgagttttaataaaatgcatttcacagaagaagaatatgtagaaaaataatcacaatactatgtagtccttgaaaagtgctgtaaaaaaaaagatataccataaactgtagaatattttataagaatgttcataaaaattcatagtcttggcattggaaaaaagatcaaacttctgtcctctacaacacctctattaaaatgacaatagagattgctgcatatctctaaggatagatcagttactatcttccaagggagaatattccatatagacagctacagctgttagctagttggtcttatcagccataatcaggttcctcataacttcttgtcactgatctgtattctatccccaggaagctagacagtataaacccaatccctcctccatgtgacttgaatctttaaagacaccatcatgtcatccttgatttgcttttctctggggttagtattactaattccttcaaccattcttcttcttatataatttcatctctgcgattataccaattgttctctgagaatatcccaatgcctttgagttcctcttaaagtgtggtaattctgaactcaacacaatacttcacaaacattctattgagcagtgagtttagtgggactaccaactcttgaatgcatcatactgtacttctagtgatgctgactgaaatagcactggcaatttttttggcaatattcactatgctgaccccattgcattttctgtcacttaaaactcataggtttttttttttaatcattcatctggctgttatttgaattttcttcagtaattacttgtgcagctgggatttgggtcacaacttctgaacttgataataagatctattaaattttatcttggtaggttatttttaagttcatagtttcagtttgtcaaaacattttaagttttgtttctttaatccgttatattcactgttccagatttgtgagataggtaaatttgatgagcatgtttttggtcatttaatatctgcatttaatatatttatattatatacattaatatatactaaagatgcctgaatttctgatgtctaaaacatacatattgcaaaaaaaaatctgtagagtatgaaaacattcattactagtagaaatacagtaataaatgactcttaaaggactactgtctcattctgtaagtgtctctcttatacaaaatcaactgtaacacatggtaacaaagaggacgaagagaaaattaaccattacttgcaaggaaaaaatgatttaaaattccctagtagttcaggaaaaaaatcatcatcaatcaatgcctttatttttacattaaagactcctccaaagtattttgaaaaccacttacttatagaactgaaaccatcttttggtggatcacaattaaaagtaatctagtgatcttacttattcagtagataattatctggcaatccccattattcagaacatagccaaaaatgtggacaacaaagcctcagaagccaaaagtgtcagcatgtagttcatgcactaaagatcatatgtatttcccagaatctctcagcaacacctccagaacatacttgttcatatttcaaatacagtccagaatttcctgattatctaattttataatctataggtaaataggagaaaattagaaattatttgcaactaagcaagaaataatagcctgcaacctgatattgaaggagaaaccaacacacacaccaaaaaaatacatatatacaaaaagatatatatatcaagcagacacaaaaactcttaagtttcataattgaaaaataaccataaaatcaaagtgctaataatctcaatgatcactaggggcattattatagcacagtaaaataattgacatttataatatatcagttatatatgttatatataatataatacaataagccaaatgtataagtttatagttaatattcatatagtttacagttaattcaagacatattcattattattattaatcctcaaaatgtttaagttgcaaactcagtaaccaaattttaaattttgtggctcgagtagattgaagaatttacccagggtgacataattgtttgaagggtactgaagttcctagtctactgtattatgaccctaggtcatcaaaaaatatatacattttgtgtcatattacctgattagtaaaacagggaagcatgcaatatattttagaaagacttctacgaaaattaattggaatcttttaagtttttgagccctcaaaggaataaaattaagttacatgaaaaattccctaatatcaaatcccaatttgtctatagtaaaaaacaaaagtctcaatttaacttgcaatgctagtaataaatccagaactattaattactctacattttaaggcctaaaatctgtacataaaaaccaaaagtgcaacatagtataaccatcacttagacttgatttactttgtttaaaaatattattggagagtcttctttcatttgttttctaggatgtacacgaacctgagtgaactcttgtacagagtagagaaggtagatgtgggatgttgcaagagatgtcatgtatcaaagaagtcactcatatactttcagttttaacaatgtttgaagccctctaactctccattctacaatgttaggagataaataatatatttataaaaatgaagagaaatatttttaattttgctttttaaacagttgacatttttataaagaaatactatccaccaaaaggaaataggggagaaaaaatgaaaaataaagttgcagttaggaaaattctcttgttacctttttccagagtaggattatggtcagtttaaaatcctaatttgttatcttaagaaccaaataaaatgcacaaagttttagaaaaacggagctatctgtttaacactcctaatggatcaaaatctgccatcaccatagtaacctctgaataactttttcctagctagtgacaattatgcacttctctgacccttgaaatcccactttttttttttttttaaggcctggaatctttagaagaaaaaaaacagagcccaacagtgaagtccacacataccctcttgttcagtccgagtcatttcctcaagcttcttctgtttcagtgtgtccaccacatcggcaagactccctttgcggcgctctggggttccaaaagtaacactggtcattatctcacggtcccgactcccttcgtcaggcttatgtggtgaggtagaggtatttcggaaggaatatagggaacataacttattattctctgattcctagaaaaataaaataaaataaaaccattagaatatacgtttctttgcatgctactggagaaaaaaatcccaaactgaggacagtatatgatgcttagtaggacaaataaaatatattaattaaaataaaatacaagtaacttagtaggacaaataaaaaatacaattctgattgaacaacaccgattaaacaaaacattaaagaagcaattgtcaaaggaactaatgtgaagttgcagattaaaactgtttagctttttaaatataaagcagtttaagtgcttcaaaaacaagcatttcaaccccttactcatttacacctttcattcaaattagttcagattcaatgactaattattaggcttggtaaagtttttcttttaattggacacttttagtatcaacactcttcccacaacataaaaaggagtacatcataaaaaacactgtcctttagtttagaacaagtagaaaagttagcttcagtagccaatgttcattgttcaccagaaaatacagaaattatctaaatcagtgccagaaagttagccaacatgaatatttttgtgtgctggggtttggagaaaactgttttgttttggtttttctagctacacagctgtccaaagttacagaagtctctttctattccttacccttaccactgatacttcagcacatttttcatgtggcatttaaaaatgtctttttttagttattattattatactttaagttctagggtacatgtgcacaacgtgcaggtttttcacatatgtatacatgtggcatgttggtgtgctgcacccattaactcgtcatttacattgggtatatctcctaatgctatccctccccccaccccacaacaggccctggtgtgtgatgttccccttcttgtgtccaagtgttcccacctacgagtgataacatgcggcgtttggttttttgtccttgcgatagtttgctgagaatgatggtttccagcttcatccatgtccctacaaaggacatgaactcatccttttttatggcggcatagtatttcattgtgtatatgtgccacctgttcttaatccagtctatcattgatggacatttgggttggttccaagtctttgctattgtgaatagtgccgcaataaacatacgtgttaatgtgtctttatagcagcatgatttataaacgtctttttttttttattttacaaaaggacaagtttatcctcagatgagaaatatttttcttaaaaaaaaggacaggcttattatagaaatatttgtgcaggaattacttcatagtatagagaagttagctaactgtgaagaggtttagatggatcagctgaaaaggaaaaagcaaatcgtaggtggaaaacaaacacctaaaagttcatagaaataaaatattcttatatttcttttaactgaaactgagggttggaaacagctattattttgccatagcccttcagcagccttgcattcaccttttatctgtttgcacaagggtattctctctccctatatttatataaaaaagtgtataaagtaaatcagccagtcttttaatcaccatcagactcctgaaaatcctaattgctcctctatatctttccttcacaaggaagcccagtaagaatcaagaacttgaggacaagcatggggcaaaagttacacagttaataactaatgggaaaaggggggaaaaggaaaatgatatctacagcagtaaatttctacatatattaaatgacataataattgtactcaacaaatgctaggtatttcggattattgtcattgtatataaggtgggatacaatggattttcagggttattgaaagcacataatgagattatatttgtaaggcaccacggcatagtgctgggctcataatactgaggtggtgtttaataactggtagatactatttcttgaaggaaggaacagatttgggaatgggactaaagagatttgtcttccttctggacctgaggaattatgaagtaaaaaatgttcatgagtctccaactaagataaatcttgtgaaacctgggaatatattaaaaaccattgaattgtatacattaagtgggtaaattatatggtacatatattatatctcaattaagctgaatcttttcattgagataaatcttaattttttctgcatacccattgctagtacaatgcccagaatagagcagctcaatatatttatgctgaaataaacagaaaaggataaaataaatggggcagggcaggaaagagagctcttctttacctttcttctagatcccttccttcctccaggaaagatgttttatctcacttaatgtttacaagaattctgtgaagtgatgcagaggaaccccttcttttagatgccagtcatggctagtatgtggctccttggaatgtccagttcattctccacttgtgtgaatgaaaatgcagagatatatttgtcaaagccatttaaacctcttaataaagtccgtattagacatctgaccaaggcttttatgaattaataatcaccatttgatcaatcatacttcagttgcttttatttcagatgccaattattgtcacattatggccaaaaaaaaaaaaaaaaaccctgactcaacctaagggattgaagaacaagtcaaaacagtaatatgtggaagtggttacctacaaatgactcacaattgactataataaaggagattttcccatcactgccaaactgaaattgaaagatgctaagagaggctctccagcctagtaacaactttagattgtcctgagagcatttaggctccaaagagtaccattttttttctatcaggactaatgccaaacaatcttatttacgcattgttatggacttgttggactatgttacttgttgtttactcatgggaatgtggtcactgccatcctgcaccacagacaataaccatgggttccttattgcagtgatgacccacactgttcttagccccataatctgtgcaaagtggctcaacactaccaagcagcagagagcaagaggctagagagtcatgatttccccacaaaagccacaagaattacttgcaatatgtcaccaaattgtaaaaataggcagtaaataaaaacaaacggcttaagtcgcgtgttatgttataccatgcttaacaacaatgggagggggcaaaatttaccatttccagccatcactttttaactttctaacacctaacaaatattaacctttcataagtggaagtctgtaagcaattcatctgagtaaaaggggcacgtaaattaataaacttataataggttactgtctaatatgaagtcaataatgccaactttaaaaaaaaatcttgacaaagaatctctggtttttttaaggaggctatgtaactttaaagtaaattttattaagaaaaaaagcccagattattttgtaatttcttaagaacagaacaggtccaatgacacatcaattgaggcaaaatatctgatatggcttagatttgtgtccctgcccaaatctcaagttgaattgtaattcccaatgttggaggagaggcttggtgggtggtgattaaatcatggaggcagactttccccttgcttatgataatgagtgagttctcatgagatctggttgttaaaaagtgtgtagacctccccactctctctcttcctcctgctccagccacataagatgcgcctgcttcccctttgctttccgccatgattgtaaatttcctgaggcctccccagccatgcttcctgtacagcctgcagaaccatgagctattaaacctcttttctttataaattacccagtctcaggtatttctttatagcagtgtgagaatggtctaaaccaatgtccaatgataatatctatcaagtcttaatgcatgtcactgcagcactgctgtgaagagacttgagacaatatttccctaaagtagtggttctcaagcttcaatgtgtagaattatctggcaagtgtgttaaaatgcagattccttcatcccataccaccttccacaatgagggggccaaggaatttgaatactgatgaacaacccaactgattccgatgcacaggtcctgatcccactttaagaaatactgctccctaaagaacaatgatataaatgtgttttgccttaatattacaatgtgaatataattgtgtaaaaaatttttaaagctggttgtgattcttcaaaataacataaaggagattatttctcttcttttgatttttcttttgaaaacaaccactgtttaacacgactaaacacatgaacatcacaaaaaagaagaacatgtgggcactgagttagtaaacattagtttattcaaaggaaatgtactataaatttcttttctttcaacccctaacttcagcagccccaccaaacctaacagtgaagaaaattttcaaaatatgatttaaaagtatcctagtcccaaataaaggaaaaaagccatgttgattcagataatctaaagagcatttcactggaaatcaattaaacacaatatgtaaaatatgtgtagatgattgaaaaagtacacagtagtatcaaaaatagttattagaaaaagtttctaggaaagaaaaagcagtttttccatatcggcaaaaatagaattttaattaagatgttttccagtatttgaagagataaagtaaatattaaaaacaaaaaacattaaaacgaatattgttcagatttttcagaagttactattcaaaactgatggttcaccaatggcattcaaatggctttaaatttaagtagccatctcatggtattgaatatatcaaaattactcaaatctttgggcatttgtgtgtcttgttgctttcccctggaatgccctatatcttccttaactttgaacccaacccgctcttcaaagttcagatcaaactgcatttcatccttgaagcacccctgactatactggacctcactatcatgctaccctccaaactacacatcaaagcacttaatcataaccatataatttagcatttaataatatactggaataaaatattcattactattttgcatgtaattgtcatatctgtaactaaattttaactcttaaaggatttcaggacttcatgcttcttccataggcttccagagcatacaacaaaattaaatatgtggactgacaaacttgaaacaactaattatcaaatatgtcaaaaataatcaaaaggctgggcacagtgactcacacctgtaatcccagcactttgagaagtcaagcaggaggatcacttcagccaaggagtttgagaccagcctatgcaacatagcaagaccccatccctacaaataataaaaaaaattagctgagtgtgggggtgcacacttgtgctcccagctgcttgggaggctgaggggagaaaattgcttgaacttcagaggtccaggccacagtaagccatgattgctccactgcactccagcctgggcaaacaagccagactctgtctctcaaaacaaacaaacaaacaaacaaaaaaaatcaaacaggcaaagagcaaagatttgctccaacaatgacaggattgcttaagctaaacatttagaactgagatattaaaacataaggaattgatgatacaactacacagtggaatacaacacagccattaaaaacaaacatacctattgaacatactgtcgtttacagtgatgaataactataggcaacctagttattccaattgtaggaattatttgagggcattatgattttatctatatgatgaaatgttttgaagctactgaaaatcatagtcttgcagaaaatttaatgaaatgtgggaatattcataatgtattgttagttcaaagtatattaataagactaatatacttttttattttaaatttttggatacataatagttgtccatatgtatggggtacatgtgatgttttgatacaagcatataatgtgtaatgatcaaatttggggaactagtatatccatcaccttcatcaacagataaatgaattttaaaaagatagtatgtatacacaatggaatattatttacagtaaaaaaagaataaaattctgttatttgcaacaacatggatagagctggaggacattatgttaagtgaaataagccaggcacagaaagacaaatatcacatgttctcactcacatgtgagaagtagtgaatagaacagtagttactagaggctaggaaggctagtggtgatggggaataaagaggagttggttgatgagtatggaaatatagttagatagaaggaataagatctactgtttggtagcacattatacatcattaaaaaattatgtacagaaaaaaagagaccatagtacacaataaaatgttaatggccctctgagtattgggacaacagataattttatttcctttttgaagttctcgatattttgtaaatgtcctatcacaaataatacttttaatcagaaaataaatttcatcttcacatttaaatataaatatcaaagaagtcatagaaataatttattcacaaggaaagatgtattaaatgaaaaaaagcatatactgtagtatttagaatataacaccaattatttatatgtgtgcataagtgtaaatgtgctcccccacacacaaacatacacaaactggaaagatatattaaaatatttacagtgattcctaaatggtggtaagactgttggtaattttcatttccttttttgcttatctgtgttttctaattcatcttccataaacatattactcatgtagtaaagaaaaacaaaagctattttatacactgatgcttaggggaaacagaaaaaaatagtaatttaaaagaatagattttggccttcttgaagatgtcgagagagtcagtatattatagtttccctctaccaaacacagaaaaaataaacaagatttctttccttggcatttctacagttgcaggatctcaaatattatttctaataaatctaattattaaaaaattaatcttcacataagctaaaatctagatacttattgctatggtttgaatgtacgtccccccataattcataaatcaaagcctaagacctaatcactttaggaggtgattaagttatgagaacagagccctcatgaatggtattagcaaccttataaaagtgctgaaggcaaatagttacttcctttttgcccttccacccttccgccatgtgaggacacagtttgttgatcctgtcaaggtgtcgtcttggaagcagagactgggccttcaccagacaccagacaccaaacctgctggtgccttgatcttggacttcccagcctccagaattgtgagaaataaatgtctgttgtttataaattacccagtgtatggtattttgttattagcagcagtattggactaagacattaattacaacacattgtttactgtttgctctcaaaagatgcataatatcaatctatttcctcttccatgtgagagttgttcaaatatcttaatgaagatatcaaattaatagtctttttctaggtaaaactcctgcactttctaaacccatttctcatttgccatgatttccagacccttcatcatcctcctctgatgcactcgtctctagatgttattctaaaaatatgtcaccaacaactagataccaaattctacatcttcactttcagcaggaaaaaaacaacactcagcaggattgttccctccatgtcacataggcaggaccggtaaaaatctttaactgcaggttttctgacaccaaatccaatgttttttctaatccatagggctacagttttttttaaaaaaaaaagtcactctcaacagtaaaagatgccacaatgccaatgatgactaccttctaagtctttttgtttccatccatttccagaaaggagatttatctacatttgaggcaaaaattacactttattattcaccttaatccaagaattaccaagaagtaacttgtattacttatgtattgttgtataagaaatcatccaaaaacaaagtgcttaaaacaaaaccaatcatttattatccttaatgctatctgtaggtcaggaattttggagcatctgggctgggtggttctgtctaaagtctcccatgaggttacagttaagtcagtggctaaggccaaaggcttctttactcacagataaggtacttgggctgggaacattttaagagttcggggctgagataactagggtttcttggacatcttactctagctctacatgacctttctgcatggtctcttctctacagtatgttagtttcaggatagtgaaacttctttcttacgtggtgtctcagagatccaaaggtgcatgtcccagagacagccagatgaaagctataccactgtttctaacttagcctgggaaatcacgctgtataactgtcactgcattctattcaatagtgagtcaccaagccttgccaaaagtcaagggaatgggaattagactctgcatttttataggatagagctataattatatcttcaaatcgttgctatgagaaatgaatcatgtataaagcacttagtataatgcctagcatataagtactcaataaatgatagctactcttattaaatacaaatgtcctttgtccaattgccctttttttctattttcaattctgaaaatacagtcatgataaccactggcaccttttaagtttttattcatacttgttcatctaagtggaataataaatactaaactacattactttcttcattatcaatgttcacctcaaaccaattccattgagatctggcttctcacaaagctccaggaactttagcatttataatttgctttttctaggaatactaccaattcttatttatcctatctgcatatggattctctctactgtgtccaggagcagctacagtacactaccgctcttattcagctggattgccgaccatacctagacaaggaatgtggatggtcagccatactgcaagcagaggagaacagtgggctggggttgcaaaagtcagatcagatgtcaggaattaagagtcagaaagcataggtcaggagttgaatcttgcctatataatgaaattgaaacccacatacaggtgggagtcactgcagttgggagaaatgactgggaaatggcataagtagctgcaagaatcaacttccctaccggctgcccagtctaactgtaagaacagaatactattcacttgtaccctttcctgtatccagtagcaagaatgaattaaatctattcattcttatagcaccatatgttgtcagttttgctttgttttccattttagttgtagcctctccagttgcaatgttatcctcaacctagtctgccctccctatagacaaggtttattgagatatccaatcatagatttgccctggtttcggacgacactcaatctacaacaaacttctgcttctttagaccctactcaaaatcaccaaaagaaagcccaaaccctaaaataggtccaaatataacactctcttcctaagacgttctatggttcactatggtatatattctccttcattaaaaatgagtaataaacccaatgtgttcagctacaggtatgttcctggtagtctctgactggagggaattaaggagctacaatttatgtaaagaagttaacacaatagcaaaaacaaccaaaagtcatttatgttttaaattaccatggactggcaactcaaccatgttagtgatcaatcttccttgccaggtcacatggctcccaccactaactataccccatccttccttggtatgcagtgcatttatatatttaaagtttcaattaaatgtccaaattatgttatataagttacatatatacaactatgtttgacatattacattaacttataccacagacaatatatgtaacattttttctgattctccactttaaacaaccttttgttttcttgatgaacaaaaaactacttgccaactgtgctatataagacaccttctactatagtgttattgactgacagaaaagatttcggttccaataacttcttgctaacaaaggaaatctaacctttttaatatgctgaagactaaattgcaaacatttacggttctttctcagaggaaaaaagtatgtttttttctaatgtgacatactgtaaagaaaaggattgggttaaagaagcatacataaattaaaatgctatatttggttctaattgccaacagattattcatgacaaaagtatcattttttgaatgatagtgaaagtgtatttttttcttttattaaaactgatatttgctagtatattagatttacataacattctcaaaattgaaataacatatgccacttatcactattactatgctgttgaataacaataaaattattcatagatgtgtcagaaaatagatttgttaccaatatttgctaaagtgtcatgattcctaaggctttaaaaataagctgttgtttcctaaatgttatttcaattcccagaaaaaaaataacaaacccaaaagtttgttgaatgtcctcattaacattctatttaataaatggaagtaaatatagtgaatagattaaatacagaaaacatccccaaacctgtcaagacagggacatagaaaagccctgcattatctatacactaccagcctcacacacaaaattagaatctcaagattcaaaggtctttaaaactccaattgttcaatcccatctagcacttgaattccctgtgcaagagaagatggaataataaaatagttaacaaagtacaggcgccctgggcaagattttccagtttaaatcccagcttttccacctctcatccatataagctcagacaagttagttaacttcttttcaccttaatttccttgtctgcaaaatggcaataataatagtacagtaaagaatttatctcaaagagttgtgggaattaaatgatttaataaaaataaaacacttagaacagtggcattacatagtaagtgataattaaatggtggtggttacaatttccttgacaagtgactatttggcctctccctaaacgctttcactaatagaggatttagcagctcccaaagtggtccattccatttttggagggttgtccaaaattcttctttacagaaatatgaaacacgttccaatctatatttctattccatggaaacattcagaatggcagttattcaatacatactcacagctattacagtacctttctatcctctcttcatctagggaaaatatccctttttccttcatttcttcttcataaaacacagtttggccagtctgaacattcttctctgagtgtgttccaattgtttctctttatatatctcttaaagagtggtgccctaaactcaatatactcagtactgtctgaacaacaagaattaagacactaagaattccttagagatgtcatgttttaaagatttcatgccatgtaagcagagctttaaggcaggcctgatagtgaatttcccagcaattaaatcaacattctatcaagattcaactattggtcaggcacagtggctcatgcctataatcccagcactttgggaggccgaggcgggcaaatcagttgaaggcaggagttcaagaccagcctggccaacatggtgaaaccccgtctccaccaaaaatacaaaaaattagccaggcatggtggcacacacctgtaatcccagctactcaggagaggctgaggcaggagaatcacttgaacccagaaggcggaggttccagtgagtcgatatcaagccactgcactccagcctgggcgacagagcaagactccatctaaaacaaataaacaaacaaaaacaacattcaactattgactggttcatgtgcctaccaactctagacagttattttcatctggcaattcattagtactcaaactaccatatacatgatactcaatctaaacaatagtaagctaagtcaaattggctatcccaattttaaccttgaaaccaagaaagttagaagtgccaagaggcttagtcattgtagttcaaatctttcctttttgagctgaggaaatcgaagtcaggagatataaagtgacttccctaaggtcacacagcaaattagggcagagatgaacacaggctttctaggaggtaacttgtgttccctctaaggcccccagataaaaaaagaaaaaaaggaacccctaccaaacaaaaagaatgtctttttgacaatttatggcattgagaaataaagggagtgattatgcagaagttggagatgttggacaaattcttacagagcacatttctatgcctggagagtctcaaatgattccatagagctcctcttaagaggtaaccacttactctggtgtcaggtcaatcttcctcatgctctcctcctctgcagttgttttcttttcatcctcctttgagtgacacccatactgtttgttgttgtttttgtaataagcaaagtaactagtgtgttttacatgaaaagaaataactcatggtatgctcttcatacctcacaaatcctaacattaaaagtatcagagcccaatcaaggtttgtcaaatccatttgttccttaatagagatgcaactctgttgacagttaagtcctttcaaggcccagtttgcctaaagaagagagtcaagagaacagattgctttatgtgtcatacatactcagggccaccctgtgagctcaacaaactcctctcttcactagatcttgtccagtaaagctcctaagtttgaggatttcactgaaagaaccttcaaattttcttctaatatgttaaattcatatggtgggctaccaagaaactctttataattcagaacattttaaataacatctctagctctcttgtttaagttcttacaactagaacaagtacaaagagactaaaaatgattcctcagaggttatgttacttataaaacaatgatctatccatccatgcatccacccacctatctctacgtacatttccagcaaaagggaaacggggcacaaaatgtcaccaatttaacacaaggcagcaaattaaaagtctaactgcaatcaggtcctcacaatgtctggaagctgtgcattcctctacctgaatgcaacatacaaccttggactgatgacacaactacaatcacagagcccatattttctctctggaaagaaaaacttttctctgaatttttattttcccctcttaacttccaaatatccaaaaacatagattcattccttgacctaccgtgtcatccaagagaacagtagccaaaaggagggccaaattctaactttactgttaatttcagaaagcaaaagaaataaactataatccaattatatctgaaatacatcgatgagagaacaaaaatgagagaatcatctttagtagaagcataccaggtatgaaataaattaatataactgaaagtcatatattgagtctaaactcaagagtaaaagctttctgaattcgttcatggattacattagtttaatcctggctaactcagtgcttatgcaaaaaattattactcaccactggaactgaccaaaaaattgataaataaaagtaattatcatataaatatttgaattattcatttctcagcaaaagaatttcttctattataccaccataatctacctgtgcttgaatgagggcacacttcctctcagaattttgagacatttgagaatattgttttctgagtactctcagtatactgggagtagaaacaaatcagagttaaattataatgaaagcaaaagtttaccaaataatttccaatcattttattaaataagattttctattttccagggtgctaatgaaatataaagaagataaatgaaatgcataaatattcatttctaatttcaacctgattgtaaaattttattagcaaaggtttgtaatttatactttggaatttagaatgtggtttacacagatatattattgaactcaatttgcatcacctaaaaaacaatgcctaggggtcaagagaatgtagtaaaggttaatatcatgaaaaataaatatgtcatcacattgaaagctgtattaacaaaagtaataatagcttgaagttgctcttcttttaaaaggttatgcttctcctggaaagcaaggaaacttttttgcagaggacaatcaaacagtggaataattttagtatcaaggtaattaatacatattcattataggtgttcaagaaagattagatatatttgtggagggaacagagtagggtctttcctgcttcatgcaggtggtttgactgaataacgagagacagccctttcaacctcatcttcaaacaaatgatgcaagtaggattcattatattaaagttggctttatggaaagcaaccctttccaaattaaagaaggtaggtctcaaggtgtgcagacacaatcctgggttcctcctcccaaagtaatatgctgcgtatcacagttgtctccatcttattcctgctgatctagaaggactttgagattaatatttcattctaatcacaataagttcaaattagtcatataaacaactgcattctatacaatataaacattattttcttcatgttgcttggaagcattatgaaaaaatgtgcagattttattgttccagttatcatatttcattatagtgatgtacccagaggctaggcaagaaaaaattttaagaaggatttctgtacaagaaaatatatattaatcagaaccacctatagactgaaacatgctcatagagttctgctttaatcaggaaattattagtgtcccaagattagcttccattgattaaccctgaccaactttaataaaaggtttatttaaaaaaaaaagctacattcaaatgacatttgaatccattaagaaagataaaagctgagtagaacagtcctgctcaatcagactcactagactagattcacgctagactagattatactagattttttattagtaaccaagtcttactttaaataattatcaaaaagctacttttcctatgtgtgtaaatgctatagactctaagctacactttggtcatatagaagtatttgcatagggatagttgacaggaaaagtcaaaccacaggagcagccctggcattactatgaggtatacactagcagtacataggtaaagtaaatgaaaacaaaatatccatcaaactgaggcaaacataaaactgaggcaaattaggagaacgttggctgactccaagaaaagataatccttttgaacatacagtaatgttgcaaattgtgagtgtcagtgatagagttcattaaggggttcatgttatagtcagtgcactacaaaccctagtcattggatcttatacagacttaatgattaaaataaaaataaacatgacatgtgacacctccttaaagacattctgaatacacaacttcactgaaaaaaaaaagatactaatgtccgattttcatttatctgtcaaaatacaaaagaaatgcaaaaagtctttgcacagatgtagcaaagtactggatttttatattttggcaggtgctcaatacgcagcccacataatcacatgttaatgactggagtgtgttaatcagcatgcatacctgattccttcttgcccaagggggaaaaaagccaactattccagagcatgttaatgtctctacttttttttttttgagatggagtcttgctctgtcgcccaggctggagtgcagtggcacaatgtcggctcactgtaacctccatctcccaggttcaagcgattctcctgcttcagccttctgagtagctgggaccacaggcacgcaccaccacgtctggctaatttttgtatttttagtagagatggggtttcaccatgttggccaagctggtctcaaactcctgacctcaagtgatccacctgccttagcctcccaaagtgctgggattacaggtatgagccaccacgcctagcctaatgtctctatttttgatgaagattttaataatatgctaggtaagaaagaaaatttttccaaaaattatccttagaaaggcatattatgtaattaagaatcatgaaaaaataatttatatttccataaacatcgagacacttccaagtatcataccagtaaccctttgtttaatttaaacaatttagatttggggaacttttaaaaatacatactttttctaaaggacagtgcacattatcagggtgtaaaaatataaaggaaatcaatgtgtcaacactagacaacatttgctgtctatttcactacccacagcaagagctttgccagattccatgcaataaaatgttttattttttagttcaaatactaaataaatttctgtcattaaatttctgaaacaggttgaaaaagagatagtaccgtatgcaaatatagtttcaaagttacaggaactgggaaatctcccatgagtcttcctagaaaatactattcagtgattcaaggtaaggatggccattttcacctgttaacagaaatctaggcttgaactttactaaaattgaatgaatttccaaaatccaaaaatgagagaagtagtaactaaatgtctcaagaagtctaaaccttacaggtttatggacttttttccagtgcttcataggccaatcaggtatcacaaaggtgtacataaatcttaccttaggagttatgactatgactatacactagttagaaccaagtgaacgagtgggtttcactacactttctaaagtacagtctcaataaaagtggggaaataaatttcattttggtgctgcctactatcttaaatgacaaaatcttacaaaaaactggcaacaattcaagtttttaaaatcttctctaaaataacaagattagaaatcttctcaaagtctgtcataacagcatgactgaagattagatcctcactaaaaattcctggattgttatcatgtaatgacaatagctccattcccagaaatggtacaaagtccacaccagcaattttatgactccaagtgaaaaacacaaaacactccagagttgattagcaacttcatgagactgaaagctagagaagcagagtagaaattgtttgcaagcaagaaggtgttttccccaatagttatttattaaatatctcagcatgcctaccattattttcattcaattacaacaaagggcattattgacatcttttatttaaggtggaaacttattttaaaacttttctagaagataaaaactcccctggaggaatttaagtaggtctctaaaataagaagttcagatattctggggctgatagtccactatggttatttctacctacttagactagtagttaaaagccacatgtatatttttgccaaaatgtgtatcaatataagaatgtgtgtaagtgtacacatgtacataagttcccacttacaatcatcacattttgtatctcataagagtgttggtgccttacccacatctccatggcctaccacagaagccacctactaagagttgcttcttaggcaaaaagcttgtctctcacctcggcccattctctggccgagagcatttctactcgcttccctcctctccttggtctcaccaacgtcatttcttgtcattcttgactatgtttctgcccacatgtacattacttaaaacgttgtctccaccctttgtgtaaattttgtcttcttcagaatctctgagaactcttcaatgaataacctccctaactgttcactcttctgcttatcatcaatcaaactctcacctgcaccactgcaatggtttcctaatcggtgtccctgtttctgatgttctctctcacagtccactctctacacagcaggcaatgtgatcttttaaaaacataaatcaaatcatgttactcccttgcttaaaattttccaatggcttctacttacacttgaaagaaagtttaaacacttccctgtagcctatgagactccataatatctgtaatctgtcagcctccctgatttcatttcataccattctctgcctcaccagccactctgttgttttctgtttctcaaacatacaaactacaagacttttgtacttattatacactctgactgggtgtcttccccaaatctttgcacagtgattctttttattccaatttcagctcaaatgtcacctcctccaaaataacttccccagtctttttaaagcagtaattctctatcacatgttcttacttaattttcttcatagtacttatcattgtctgaaattgtctcactctataagacttctttattgtctgccatactactagactataagttctatgataacagggatcttaactacattattcacaagttagtccttgtgcctggaactttagtaggtactatacactcaggtatccagtgatgataataactcctttctaaattatactctaaagcaaaagaaaaaaaagtaaggaagggaaggctcaaaataacatgtacgttgcaatttatctgtttgatacaagtagctatacataatttgcaccaaaaaattgtatgtaatctgcagacaagatcaccaacaatatataagtttatctgtcctttctacagttacaatctagcagataattattacacacaatatcatatacaggtcatgaaacattatcacaaaaatattcctctccatgcttattaacatcaaaaataataatatcctgtacatttttccatgaaaaaaattatgtgaatgtattccagcctaatgagtcagtcctaatgagaacaaaagcacattttagtggacagtgtcaacattcctctgcaaaaaaggtattggcacactgggtgccatgatgaaagtggtagcagttgtggatagaggatagtgaatcttatttacattaactttccaaccttcaaatggctctcactaattaacatagcacattaaatttataattcaacaatttggtgtgtataaataggtaattatgattaaaatcagaatctaaaactttttatctcaaagtggtccttgaaatcctatttctaaaatttctattctccttctttgcttatgccattacaaattatttttcttgtttgaacctatgtggtctcatattttgttgcagtgtcacctcaaaataatcagaattttcacatttaaagattttttttctaatcaggaagtgggaattagtagagcttctttgctttgtcttcaccttctctgacagaaaacttcctctgtggtcatgacatttcaaagtaaaacccttcctgtacccaagagataagaaacttttagggcttgtttctaacagttcatgaatgagggccatgagggccattacagaaagtaaataacaatggaaactgtataagtgctgaaaaaattattgttattttttagattttcttttaagttttattttttcacaactattttttgcgactctaagtacagaatatgatccattaaaaaactacaagttttacttgatttcataaacatgtttttgacttcatatttattttaaagtagaatgaggtaaaatgtttattaaattttatattagcagagtcctcccactccaacacacactcacacatacacacacacaatatatgtaggtttgcaggtctgcccagaaacttaaaatccttctattgttttttttcctgtaagtgttatggtacttacagtataagtcattacaggtctgatattacagttgttacaaaatattgaatctatccagtgaaaaagaagcacaaagggaatttccaaatgcagctgctatttcccatttgttaaatccttttattacaccatataagtacacagctgggaaatactatagagtgggagtttaaacaaaatattttggcttctagtcattcggaatacacaaaggctccagtggaaagcaatgtttgatagcaaaagaaagtgaaagtttgaaaacatgtctagcaagtatgatttcttttacattaatatttaacttatttgtaccattaaactattttatactatcataaaccacatttaatataaatttggtaagaaaattattaatatatttttaagacaaaattttagatcataaaagtttgataataacccaccaaagtaacttggcatttatcaagatacaaacaaaatttttctaggaaaaataagtatagtgttctcaaagaaataaaatttgaactgtattatttcttcttctacccatattttccagtccagttatttttatttgtctatgactagatttggcataaaagccaaaatatgtcttaaacccatcctttctctctagccactcttcctttacattaatccaagccattcatctctcacctagacttctgaaatagactcccagtgggtcctccttctttcactcttgtctctctcccatccattcattataccacgccagactttatctgtttgaaatgtttttgaatgcttcaaacgttttccattgaacttagatcaaatctcacatccataatgttatctccaaggtcctgtttgatatagcccctaccaatctctccaactatatcttatcctatattgcatccttcatcataactctccagcgacgaaggccatcttttactttctgaaattaagcagtaactttctcacttcaaatacttcatacatgctgttccctctgcagttttactctttgttccactctacctggttagttcttaccatccttggctcagtgagggcattcctaaccatttattctaaattaggtttgccccattatgttctcacatagcattctgttctttctcctcacacatagcaaacatcacattttaattatatatttgtgtatatatttatttaatttctattccctctcccagactataaactccatgaaggcatgcatcatgtctgctttgttcaccactatatagtcagcacctaatagaatgcttggcacatagatggtactcaataaatatttgtttaaataaaaatgaaacatcgctccattatcttgccaatacgcaagtggcagtgactggatatctatttcaccttggaggtgttaaaatgaacaacttaagttcaatcagaaaaacagacttgctttattaccttcttcctactcaagaaaaataaatcttccagtggatcgaattgtacaattttgatccctttcaaaactaaaattagtctagaaactacctttcaatcctctgcttctcacctactgtttcagagcattgactgtgtctgcaaaatcatctgaaaaagaaaaatgtctgccttcataaattattgaattaagtctctgagacattaagcatcaaataagaatttaaatatgtgttattagtagtaaaggcattgtaaatattaccttatttttgttaagaaataaaaattttctcagtgtccacttaaaataattttcattaacttaatttttgttagccaaagattaagaaatgcaaaatggggtttaaaacttctaatctaataaaatatattaacattttaatctcttctagatgctaaaaaaattgaatatttttgctttgaactagataattaatgtcactgactatggtttctgttctgatggttagagatggaatttaacatgggaaagctggctaatacactgcatgtatttgatgtggtttctactttttgagaaaactcctgtagtctgattgacttattctcacgaggtttgcatgcccttttgaaattaatatataagcacataagtgagaaaagctttattataagtcaagaatgaccattaaaagtgataaatacctgcattttctcattgaaggtgtattcaacatatgacctcattcacacagacatatttgcttaattaaatttttcaatattaatacataagcatactttatttgctcatacctattttatgatattaccaagttaaccaccttaaattcatggattcatagaataagataaccaatccccccacaaaaatcaatcgataaaatatattactggcacattgacctaataataaacgtatatacactaaatcacaaaccatttttcaagtttttccagttattagtatcttagtaatatgtacctggtagttgtttcatgatctacacaaaaataactctaaggtcatctatttccctaaaatatctatttataatgaggacattctaaggaatgcatttagtggcagtggtcagattttaaaggctcaccattctttgctgagatgacagaacgctgtcccagtcagcatcttgttgaatggtactgacaagtgttggtagctcctcagagtgaggtttgttgtgcattatggggtgcagaggcagatgggaggccacatgttgatcactgccctcttccttttcccttgaggttaaatcctgggtcattgcatcctctccatcagctgcacaggcaaatggagaggtggcttgcttggaagacattcttctgcagaaaaaaaacagaacggattaaaaatggctgtcaataacaaaccataaaccaatccttgcatttggctagttcaggaaagaaggaaagttatttaactttagagatatttgtggtccactctaaacccctgaaaaagaactcctggcttatgtgtccttctttccctctttgcttttaactcagcaaacctcttcccagtaattactgcatattttctctcttacaatccattaatgatttttttacagagtaagttttcataatggacagggtgtgtatgtgtatatttttcctcctagttttcttaactagattataagcttcttgaaagtatttagggtgatagttagcaatggaaaaaaatgaatcaatgaactggcaaatgagtcagtttgcaagatgatttgaaagcacaattatccaactttctcctatggtttatgtaggagcaaaagaagggggatatgtaggaaaatataatcaggagagtaaataattcataatcaaagtcctaaacaaatctgatcctgacttctttgtttacactttgcattattagggctgggcctaacactacttagtgccatctaaagctttttaaaagacctttgaaatgagtcaattgttgtaacttaacttttaagtgacatattgattgagtggctgatactgttagattagttttagggcaattttgtagcatttgaattaagtatctgaaatagctatacctctattttatattaggaagtatatacaagattcgaagcatttaccatgaaaatagtaaaatgcctactgtgcataatatttaaaacctccaaatacaatattgaacattcatttatatgcccacaaataaacattgactacacgctacatgacaacgtctccattctgtgctctcatataaaatcagaaaaccatgattattaaatagaatttcaaaatgtttagaatatcattttattaagatgaatttcttggcaaaatggttagaaaataaaaccactgaaagtgtataacttaacagaagagggaattgagcacttttctaaaactttacattgtttttagtttattacatctttagctctaaaactgctgtgtaatgaaaggaataaaatctccaccttaattgctatttaacattaattgatttcataccattttttaaaaaatgcacaaatcagttaacataggaaaccacatgagcatttttcaaattagcaaatcattaacttgctagtactgtttctacagacaaataaatactgattaaagggtctagaaatctgagattaacagttaaatttacaaatctgtcacacgctttcatgaatattgcagtgaaggaaatatcaagtgcaaagaaaaataattaagttaattccaatttaaacagtagtttttatgtagcagcccatgtttcacataggatttaacagctaatgctaaatttctcacaattaatgagggggctcagatttagtatcctacagtgaaaaaaattaatataagatcagctaatctaattatgcgcagttcaaaataaaagtattacaggcttttgaagtgctttgaaacatattaaaatgctgataccaatttataataatcattctacaagtaacaaaaattgtatctattaaatttgatactagaaaataaaatgggggaaagggaatgcaaaagaatgcctataatttctttgagaagaaatgaattaaatgttctaaagagtgctatatcaataaatcagatatattcttgatcaatttatatcaataataacaaatggacaaacatatacacaattatgaaaaatggtagccaatggatgcttcttagtataagagaattgctgtatggcttactttaccggccccataactactattagtaaaaccaggcaaattataattgttctgcaagtttatcaagagcttgccacaaacaagggtgatttcctatttcagatactgacaatatcaataatcattcacattaaaaacaaaagaatgaatgtacttctgctttttaaaatagttcaatacaattgaaagtcatgatccaaaaatcagagtgactttacttccctcaacaaacatcctcttattataaagtgaattggctccttccaatagcaatgtctatgattgttgcttcagtttaaattaatcatgacaaaactcaaaatgaaaacagtctcttaagaataatttcaactataaactgcaccagtgaacaatagtgcacaatcctaattaaatacaactctgcagctgtaaaaatagactaaatctatgagttgagtttaaaggatggtttgttagaatgttttcttaaggaaggctgggtcctcagtcttaatcagccaataaattatttcctgcaattacattaaatagaaaattatcttcaaatggggagtgttaattgaaaatcaaaattcagagggaagtttagaaattacacgctgaatacaattagtgaggaaaggcttcacctctacttcatcaacagtcttctggtgattcctccagtggccattcaggaatgctacctatttataacatctcacaatttgtcttttattttgcatctacaaatacatatgtgtatcaaggttgcaaataaaacacaagctgccaaaaaaagcaatattaaatctgagtgttcattctcagttcacactatcgttagaggaaaaggagacaggggaggtaggacaacaacggttaacaatcaagaaaaacacactcagttttgaaatccctttccttagcaaaggaattaacattttttgttccaaaaatacttttccaaatcatataatttcttgtttttactttattatagttctcaaatgcattgctagtggtgaaaaagatgggttttgtttttagcaaggtatttccttgagcatttccttttggtagaattgttggggtttttttgtttacatcttttttttacatttggtcttgttgttgatttttgttttgggtggcagttttgagttttgttataaaatgtgcacaaattgtttttaatgcagtttattaaataaactttagatttgctgattattagatctgattcactgattttttgcataaatactttattaaataatcctgatgacatctcattcatttctttagctttcccctttaaaacattttactcaaccaaccaaactgtattctagaagcttcaatggcacttgacttttggtaatgcctttactataaccactgtaccatagttactctcctttagaaactcataaatcaaatatacccatgtttcagtgttttaaaatgtcatgtggaatgcttacatttattttaatgctcagtcagtaattttccattgcaaaaattttcatccccaacatattaaaacagcaccttactttagctgctgccttatatgactaataagtaaaagaaaatcaaaatccttgtggaaatggtcaatttcgatgtgactttactttgttttatttttgcactattataacttaaaaatcattcaaatgaattgtttttttaatttgtattaaaaaaaaatctccctagttataccccctgaaaacaggggtttataatggaagtgctgacacaaccctaactaaagcagcgcaaatgttgccgctataatacacaaaatcaagttctattattctaaactatcctcgctcatgggatttttctttactgtgctcccagccaaactgctgaagcatgaaaaatttaaatgcaatcaaatgcgcccaattctactttactagaacaagtgtctacagtggtacaatcttaaaaggagatgcaacagatttgtttggtgttttttttaactgtttatttataatacagtgcattggagataaaataaaagaggaaattacactcacatggtaccagtgtattgactacacagagtacattataatcagagagaaaaactacattgtcaacttatcacattggttaaacaagatggttttctggggcataactattatcaagtaaaaccttcaaagagaattatatatctttgggacacataaaactaaattcccatcatatgttccctgagtttaaaatgtctctgcccaacaatcaagtgaactcccaggatgccaggccattgggaagaacttcgggcttaggacttttggaaatgagattgctggagataaagcctccagttactgagaatgttctctaggaagtcagtacgaacacctctagaaaggtcataattattttactccaaaacaccagtacaaagtctgaatgtttggcctactacaaacttactcagacagtaaatttattttctgttctgcaacaataaatcaaaattagttggcccaagactttataaaatgatgagaatgctggatatgtgcacattaagtcttctatctcagaatatcatattttctagaacttttctgatttgacattattctttaaaaacagttatttttatgtgtttaaagtcaggattatttttaaacaacttcaaacttttaaactttctcataaggcataatcactcaaaattacatttttttattatagcttgaaaagtatccatctttcaaaactgtcatttgaagcttacataattatcaaaaagagccactgaattcatcatagcaatatatttaactgaatttttgaaaatatttccattatttttatgattattatcaaatggcattcactttccaggtgtgttacatttattcaaaaaaagtcctgtttttaacataaagcaacattttaagagttgttctacttattcaaaaaaattaaaacttcaggccaacattcccatttatttttgcagctcagccccaggctaccaaggtagactcatttcatcagataattcactgttaatataatgctgtacttgagctgatattgagaaataaacaactaattttccaaaaatatatcacagtgcctctcatcttaaggaacatgagtaacagatatgtttagttgccaaaatgcacaatacccaggaacctctacaaaggacaccagtccacccagcctagggcaaagaatgattttaaaaccctcttcttctatctctaatttccacattcaaggatcttggggaagggaggatggcatggtacatcctaattctagacattaaaatgaagacattccttttaaaacattcctcaattcattccagtaaagtcggaaggtgcttactaattatttgtattactttatacaacaccaccacctcctctcccccaatccacctccaaacttccctctgcttctgccagatttttctatttcttccattaagtaattaagaaaattcaggtgaaaagaaggtaactgttttcagaattaccttggaaagttataaacctatcttctagagtttgtagcagcactttcagaacagatatggtaacacatgaggacagtaactattagaagaaaactcactgattagaattagctgtcaaatcaatggagatgaggtaaatgaaatacatttgaagcccttgaagtgtgtctaagaaagtgcttaaattaatggattctgacttttctaagggtccaatttttcacagcaaagcaccaaaattgtctccaaaggccctctgagcttcttacaaaacaagaactacctggaacagattcttcttaagtcatcaaagtttgtgtttctagagtttatatttagctgacaatattgctgtcactttatgtagcttaagactgttctttggactagagctcatatgtcttggaatgctttgactcatgaattgtttctcctgataatgttacatcacgtaactacctctgtctaattggttagtatctgctggaagagacaggcagccagcctaatgactggcctgctgactgactgcctatggaaaacctataattattaagtgtccctgagtatctggtttcttcctgggatcaaaacaacttgacttcatgtaacctctatctatactttttgcttgatataaataatatggtcttctcacagtttatctaccaataactttttggaatttttgctttggaaagccaggcccagattttataaataaattcagtgacttaacaataagagtaaaacctaacaatggctactataaatatacactaacttagaggattttaatctagcacaatgactttatagctcaacgaaagacctctgtgtggctggagtgaaagaaagctgtctaaaataatagcagaatgaatttatttatgtaagttcactttgaatttcctcttcatataaaatgagaactacaattttttaagtgaataaacagacatctctctgtcagcgtgaaactggcccattaatatggaagcccaagtacaggatatcttatccaattatattaataaaaatcataaaccagaacaataacttctcagagacaaagtgtaggaaattgtcactgtatacttttccatccttaactcgaatttccctcttcaatatttccagaaaaaaagagaaaaatgaatattgatactttagattgtttcaaaatatgaaaattcacacaaacactgaacaaatttatataaagaaactaatctctgaggtcctcctttagctaaataaggcaatctaccaagtccactctttcatgtgatgaaataaggtataagtttcaggttcctattcaaagacagacaagaagaagagaaagaagagggagggaggaagggagtgagagtagaaagggaggggaagaggaggggaaaaggggagaaggtaaaaggggaggagaaaaacaaccatggctttgcagttcattttcagtttgtctacttaatgaaaacctcattgtacaagcctgaaaatcatttccagcaggcaaagtacttctgattcagcagaggttacacaagcatcaaagcagttaaatataggtgccaagctgcattgccaggagctcttagtactgtgagttagtgttacctgacagcttagtgaatataaaattacttgtttctccaattgaagacaatcaaattgtcaccttccattgtaataatgcacaactagtgatcagcaaagtgcaaacataattaccatgaagaaaacaaaatatcaaatctaaatttttcaacagaggaaacacatctatcttcttccccaaaaaaggagtgcattttaatcctgaaggctatgatgcaatcttcatgttatttaataataagatttattcatcttaaattaaataaaaatgaaaaacaacaagaaatactaattcataaaaagtgactacaaatattaataagagcactacaactttccagacatttccaagcacaaagacctacaaattatatcactgccatttgaacctatatcattaaagggtatgtcagcgcattttccattataaaaactttgtttttagagatgtctttctagcctagcaaccttcctgaaggttgaaaaggacaggcaggattcaacttcaaaagcttttgtcttaatttttctttaacagagagttacgcttcgttttcgtcttctaaagtagcttatatttttgatgctgaaaattcatctcatgaaagtgatttaatatctctacacaagtttagaaaaataaccaagcataggacacatatccacaactgtttttcagacactcagcatctagaattctcatccaaatttggtgaccatattggctcactaccaaagtgatctcagtaacctgaagctaaattaatattaaaggactgaaaatttgacatggttctcccgcactccaaagattcctaagatacaaattaaaatgaatataattaatatagataatgctccaaacaaactgcattttaaaagctctcttagaaaagtgattttatttcataactaactcaagatttaagacattcaaatttatatcattccttctaatacagcaaaaactctaatcattctccaaatactctaaatataggggctttttccatcaataatgtcatttttatcagaaaatatgtcctacagctaggcctgctgaggtggctcatgcctgtaatcccagcactttgggaagctaaggcaggtggatcacttgaggtcaggagtttgagaccagcctggccaacaaggtgaaacctgtctctactaaaaatatgaaaattagccacccatggcggtgcgcgcctgtaatcccagctctgcaggaagttgaggcaggagaattgcttgaacctgggaggtggaggttgcagtgagccaagagcgtgccattgcactctagcctgggtgacagagcaaggctctgtcaaaaaaataaataaataaataagaagaggaaagaaaacagaagaaagagagggagggagggaggaaggaaggaaggaaggaaggaaggaaggaaggaaggaagaaggaaggaaggaaggaaggaaggaaggaaggaaggaaggaagggaaggaagggaaagcaagcaagaaagaaaatatttcctacagctaatgcctgatatgcctgacattccatttttaccatatgcctgatatgccattttaccaatatttcctacagctaatgcctgatattcccattttaaccatttcatttttgaaatatttcctatagctaatgcctgatatgcctaatattccattccaattttagaacagatacttctgttctaaataacatcatttatgatcatttaacacaaaaatagaccagtttagcaaaaaagggggaggcactgactacaccagggtgacagtgaaatgaattgaggctcatcaagagcataggctctcctgagcttgaatcttagaatacaaatccagacattagaataatgctttcatctggtatcagtctcaactggtgttcctcagtcttgcattgtgttcctctttctccattcctctattttattacgaaggagtagaggaaagaatgagatgaagacattggttgaacatcggtggctaaatcagaaggaaaacaaggatagcaagcgacaggagaaaggggaagtccagtctctagctgcacgttttattttgatttgagataaacttaacatcattaagagaagtgtctgggtgtaagaaataagacggttttagaaaaacatctttttccttgttcttagaactttcaaataatataatacaattttttccaagagacacttcttataagctcagcacaataaaaacctcccaggcaaaggggattgcaatcagtatttcctaaacttcgatgatgagtaatttaatcaattcctgaaattatactcctacagagtatttattacaatatactaaaataaaaagtatcaacgagaggaagaaaaggaaacttcttgtcagagaacatctttcagaccctgggagataaatgcttacatagcataagctcatggtaaatgggtaaaaggagaactcattaaaatattttgtttaattaaaaaacaagttaattctgtatatttcatgaggacagggatcatctgtcttgttcattgctggatccccagtgcccagcacagtgcacaacacatcgtagacaatcaatactatgggaatgagggaggaaaaggcagagagggagagataggcaaatagcttattgttttaaattaaagtgaatagataatcacagaaaataccactccatgttaatactgccaatctaaacattattatttctctatactgtttttatcaagcatctcattaagtcataagattattatatccatatccccaacactaaactctctcatctcccagaaatccaacagtcctcaaatgactgttaagtatttataccaagatatgctctgcaatttcatattaaacaccttaaaactagattcatcactattttcctcaatacctcccctcattcatccacacccagaagagtaccactgtcagaatcatcaaggttcaaaacatgaacactctatccacctcctcatttttatccttgcttctcaatgccagccagtcatgaagctccatcagctattctttaatgtttcttatgctcatctctcttaccatacttataatcaccttagcacagggctttttcacacctcatacctaaactcttacaacagaccctaaactactttctctattttagtatctcctccaccaaatcaatcttaactgctactcccttcatcaagccactctcctgatcaaaaaacatcagtggctctcccctgatgacaaaataaagtccaaactcctgaccctggcacttgaggccctccatccagatacaaccaatctttatacatttatcttcaccagtcaaacttcacttattgttgcctcctagcctttgctctgcctgtctctccctattttcctcactttcctttcttagtgttaggaaaccaactgagactattccagttaactacgatctacccctcttctaaacacctctaataagatctgtgagaaattactttttatatcactcattcaacacttaatggatattacctcacataatcttttaaaaatgtataatatcattatattttctaagtaaccccaaccgcattacaaacttctcaagggtgagaacaaaatcctagctttctctgcattcccacaatacctagaacaatgttttgtgaaaagaaacactcagtaaatacttcccaattatttaaatattattgaattaataggcagaaataaatttagggtgttatcttcaaccagaaaaaagtagccatgaaaaaggacttaaaataaactggtttctgggggtgtctcctctttgcacacactctggacaataaattcacctcatattttaaaagttctgcatattccctggcaaagaaagcctcccaaaataatcaatttatgttgtcagaaacataaaaaaagatggataaatgaatgaaccaatgggcagatgatggatggatggatggatggatggatggatggatggatggatggatggaaggatggatggatgttgaagagatggttgaaaagatacatagataatttttactagatgcttagaaagtaccaggcaggcactgtgctaagcactgctacatgtattatttcatttagttcttagagcaactctagaagttaaataatgtcattatccctgtttactgataagaaagccaaggcacaaaactgtttattaaaacaataaaaatgaaaacttgcttaaggtcatacctagtaaatacagagggcaaaatttcaactcaggttggtctaatgccagggcagatgctattagaattaaaagtgtctgaaatctaaattaaataaattattaactattttcaattattatctgaattattctttactaatttataccattcctgtagaattttattttgaatattctggttagatattctaaatactcatttaatcagagcttagtaaaaggatttgctatctttttcttttctgtgtacttctacagtttgagatatgtaattactagttaacaactttaaaaaagagagagaaacatagagcaggtaattctctaaccaatccttttaactgtcattctgggcaatttgacaacaaaattggttgaggaagtagttaaagctactgacacacaaggctgagaggttcactgcagtttttacacagtaattttctaacaaatatttgttggttgttaactatccatgcttttcctagcatgctatttctggttagcctagatgatcaacatttaattatattcttacacagacaattatgaaataaaataagaatgtcactgcccgtttatttcaaggcccagagaaatatgagatccaatttctaccttccatctctgaccagagaaaccacaccagctatatcagacaaaactggagctgcctcactacaaaagtcggtgttgagaacagccttgagagaaaacaagatgaggagcttgaacaatatgtatttaacacactacccgtctagagctgatttcagggaatgcagagtaatttagataccctcttaaaatatgactactatataacattacatatatcctaacttctgaggaaaagaaatagaaaagcctctcatatgaggacatgaattcttataaattataattgtctgtgaaagctgaagaaaggtttttaccaccaacccaaatttccacatttttttatacacaccaaacagtctggtttcacaaataactaaagtgctgctatcttgtatttctccctctgtacttccaccacctcctccctttcttatagctatttgctttaaatttctcacttgcatttgctggaattatcataaacagctccaggagaacatgagaatccaattgtttccatgaatcattgcacagaattgtttgagttatcattataaaagacaagtatgactacctgctgtcttgcatacttaagggattctttaccaagtacatatttgcacacctaccaaggtacagaatttctggttttcccaagctgtggtgttagttataggaaagaatcctgcattatttatctggtcctgttctttcttctcatataaccaccacctccacctcacgatttcccaaaattgagtagtcccctgaaaaacttttacatttatcatgcctaatctaccagctttttagatttcttcaaaagtaatactttatttgcatccatggtgcctagaactggaaaactgcttgctaccagtcttaccaggatctattgccagaaggaaaagtacagtataatggaaaggtttagaggaaagacttaaatctcatttactatgtctgtgaacttcagaagttacttaactctctgagtctctatgtacccatctataaaattagggacaacacatcttccttgaaaagttgttgtgaagagattaatttgatatatgtgcaaatacctggtatttggtagttatgaaacaaatgctaactttctttaaagaaaacttgacagaaaaatggtttgactcaaacaaaaacaaataaaaatccttaaagaaaaagattctgaatttttacacatcacaataaataaaaattccacggaatataagttttccagtcccaatatactcgtgacccagtgctgagtgaactaatgacaagaaccatgccaagaaaataaaaagcacagggtaaaaatatattgttactgtttctcaaaaggggtatggacaggagggaatcactttttacacagggaagaccaaagcctacagcatctgctgctgataactgtattcctaaggacaatagagtcctgagctgtaggtgcctattcaaaccacctattattaacctctttccttgattttcaactaaaacggtccaagtatttggagactgtaacccatttgctcagaattaatttttaaacagaagcagccttgcagtatactaaaattgctaccagagcttaaattaacttgacaataaataaaaagtctgagctaccctatcctatgaaatacatgaatacctttcaaagcctgattattttcttgtcccctggcccaacactaaatgttccaaaatgttacttgtttcacacaatttttttttatttctaaatcaggtctaaaatcaagttgctactagtgtgctaaagaaccccagcacattctcatgagctgattgaaagcagcttaccttaaaattctcctctcacaattcactttagaaaatcaacttgaggagtcatagatttgctagactaactgtttggtattctggtcaattcattatcacaaaataggtattattaactgtaccacagcttagaacaatgacacactattccatgtgtagtttgagatcactatttccacaatttgaagctgaaagttccatcatcaagataaacttgcctaaagaccaaactcacaaacaataaggtatctaggaaagctggataaggaaagaaacaaattaatattttgaactttgacaggcatgatggaaaacaaattcaaggtgtgtgttactcagaaaaattcaaaagaaatgtatcgcagaataaaaaggagtaaattgaaaagcattgataaagcactatttttaatgcacttgccaatcatcaatttaatttactatagttttatataaataatactttcaatacatagttatagcattaaatactataaatctcaatgtaataccagtcttgcttagttatagcagcttatgaacattaataattttaagtttttactaaaaacacatcagcaattacccagtggtctgcttgtcagttgtgtttctttgaaatgtttattatgattaaatattttcattagtaaaaacatcttttaccatagtgcataaaataccttatcagatgcagcatatattagaaactagccgtgtatattggaaagattgattttattgaaaagattcatgtagggaatctatgattcctcatagataatagtactcaggaccttagattatacagaaaaaataatcacatgttaaaaatctacgagatgctacaaataaaggtatgcatattcaaccctcaggaaaaccaaatctgtttttaaatagtctgttgcaattccctagcaagattacaaatgtcatgcaaaaatgcttttcaagttattaccttattaccataacataagcttttcttaacaagccatcatcccacccaatcaggtaggctttgaagttagaaaaattaaaaggtaaagtaatacagccaagacctgtgacagctaaaggaagcacaaatcactcacatgaagtggctgctcttccactcttcaatccggctttctcttaccacatcagccagaacttcagaacttgagggcataacacctttgacaccttcccaaatcacaagaaacctctgactgccaaccaaaaaaaaaaaaaacccaaccccacagctaattaatctctgccaagtctcaggctaccaattgtagccataactttaagcaacatctaatttgctaaacaaaacactgttaactttgttcaacaattaaaggagttaaaaacataaaagtaaatgaaagaagtgaaatctcttggcctgttgggagatacagtaccccacataccttctgccactgctgctacagttaagcaaactttacaagctagtcaagccatcatccaatagagcctatttgctgagcaacagtggagctttgtggtttgcctcacagttgacagtaagttatgagccctttgtgagcacaggggaaggaaaacagagatcggaatttggcaggaaaatataatacagaattctcctgtctatggaacctgaatttttgtgaaaacaatcaagcattgttgaaagaaagaaaagcaactttgacagatgaaatatagaggggccccttttaggaaaacagtaaacaaagcgccattcaggccaggtccattctgtcatttataaagatagtttcttctgtgtggtgagagtttacagcaaagagttcagattcaacaaatcaagtgtaaaatctcccacagtccccattaaaaaagcctgctaggaaaagacaggaatgccaaagagaaaaatatcacaagtttttctgtttggtagagaggatacaataagtagatggggtgaaagggactctaagagaagtctgaaagacaagccaaaaaactaacaattgttaattataaaaggctaattttgtcagagacaggaaaagaggaggacactggagatcactcaatagaaatatgaaaggaagaagccattcttcatcattgttggagaactatgtctctatttctccaggctggacctcatgaggtcatcattggcacgaaaggctcaaaaacttgggcttggtactactatagtttggccatctggaatgtcagcacacagtgcactactttctccaaagtatcttaattcctctttccaaaaataggcaccctggccagctttagtcacccagactggaaaatgtacagcacagaatgaaatgaaaagcatttttgttttctcaccctcctcaactagaaatacgatttctgtgcgggagaattaaggaagaggggcccagagcactgaagctctgatttacagagcctatttctgctatgcgtacggtcggcaattgttagtacttataaccaactgagttttgggcatccatggaattcttaaagacgtatgtcttttcagccaacacagtcattgttaatgctttaaagaataaaaaagagggaccacaagccaataaagtcacaattagaatcaaatgacacattgcttgcacatcatttggaaaacatgtataaaactacttggtttttgctacacccagctaaagtgacagccttcgctgtgtgttaatctggaatcaaaccaagccacacctaaacaaataatgcttagtagatgcaaaataatacggattcttttatttagactacccaaacaatttatttcaccaacgaaatcccataataactagctacattttaaacattccttttaaaacaaagcccacaaaatgctgaagtgtgcccataggtcaagaataataaaagcaagcatgcatatggattcaatgctgcagatttattcagcattggttaatggtttctatagagattgatgtcaatctctctggcctttcttgtgtcaacagtaagttacaacaagaaagatcgtggcttttgcctttgattagaagaggtatctttctctagttgactgaaggtcacagcatttgcaacatgtgctcacttattacagctcccatgcagaatgtatacataaaaagctgatttactccccaaaaagggccagagccatagtgaacaaaagatgactctgaccacattagatggttttcttttcaaataaattcagtcctgataaaccattaaacatcagcacattactaataaaactataactaggagacatccttccactctgccattctcctgccatcaacgactttcaaaattatagaatgccaggacaaatcattacattgttttaccttaaaaatatattttacaagaaaattctcaattttattatgaaagaacaaatagttctaccaacaggaaagtgttacagcaaacaaacagggtaactaaggggaaacccagttggtttgaacatctagcagctgaacagaacacaacatgactaaaatatacatatatgcacatcgattcatgtggcagagcatcaacttatgccccaattactggtctagaaagaacacctaaataagaagtgtttggagaaattatctggaagacaggccataagagggaaagaaattagcaggatttttctcaataagcttcctttcaagtagtagatattttgccacagtgttctgaaggaaacagaatcatggtttgacctgaaagagaaagaaaagaaaatcccttttctctggcctcaattctttatctgtaaaatgaggtatgtttctaacactgaaattttattagcctatgactctaaggcaatcctaataggagaaatactaaaattggcttgtgaaccagagaagttgccagttctgtgtctactacctcttttatttagcctacaaatatttactgactacctgcactgtgtcaagtaccatactgactgccagacagacatacagaggcatataaataagacagcaacttcccatagtccacagtctagcaagaaatataaatggaaaataaaccattgaaaagtgataggataagaaaccaggtactagagagatatattgtaggagcccagaagaaggaacaaatacctcattttggagggatcagagacattacagaagactcacttaaccgggtcctcagaacgagaagtttgtctggtggaactaaaaaaaaaaaggacattccaagatgtgcaagggctgagacttataaaagaatatggttacattccaagaagaggaagaactttgaagtgactgaactatggagtgcatggtgggaagtagcaggaaaaatatctagtaggacagaatgacaacagattggaaaggatttcaaatgcaattcaaaatagtttgggttttatcctctgggaaataggaaatcattggattaacatagggagtagtaggtctgaatttcccttatgaaaaaaaaatctccagtggccttaggaaggatgactcatccaaaaggttgtatatatgtttatgctcctgtcatttgtatttatctgtgcctacctgtccttttcttatcttgtccttggtgttctgctcgacatgtgatactgaccagttcctctctacctctacgttctttcaagtctccattttaagtctctacaaatgccactgataaatgttgttgaaagaaggtagatgaagcgagtagggaacgaagaggaggaaataatatgaataatcacaaaggaaatatcaaagaagaagagagaagttatactaataaaaataacaacctaatggctaatggtactgagtgcatactatgcgacaagctcattactttatgcttcacagtacctcattaaatctcaaaacaaccccacaacaaagctaccaatttatccccatttgcagatgagctaagtgaggcttagaagtggttaagtaatttgactatggttacaaagtaaatgagagagaagagattcaagtgagtcctgtctgactccaaatcccatgcttttaacttttacactatacttctaatgatatcagttactgaatgttaaccatgtgtcaaaaactatcctagctgctttgcacaggctatgtctaagacctacaataatcttaaaaagtaaatatcattgtcccccatttcacagaagagaagggagactgagtagctgatctaaagttgtacaactagtaagaggcatcaccagagtttgggtggtgatgcctagtctgtttggatgcaccctttccactacattatgatgtgtatatattctgattctttccttccctacagaactcttccccatctctacatttccagactctaccttcaaggctcagctaatatcttacttcttccagaagcctgtccacaaaatattagttcaccattgcattcctatcacgattacttgtgtaacattcatttaattggatcaaaatagatatgtatttgtttcctcctatatgtttatgttccatatccccagtcaactccatagtgcctgtagcaggctcctcaggcaagatgtactgcccaaacatatcttatactactcagcctctagaaggggacaagaattgtgtcataatacattgtatcccccaagataactggcagaaacctaagtatatagtagggcttaataaataatgcgttgaatgactccaatatactctaatagtaagaagtttttggccaggcacagtggctcacgcctgtaatcccaggactttgggaggctgaggcgggcagatcacaaggtcaggagatcgagaccatcctggctaacatggtgaaaccccgtctctactaaaaatacaaaaagttggccgggcatggtggcaggcacctgtagtcccagctactcgggaggctgaggcaggagaatggcgtgaacccgggaggcagagcttgaagtgagccaaaatcacaccactgcactccagtctgggcaaaagagcaagactccatctcaaaaaaaaaaaagaagaagaagaagaagttttcaaaaataatattagcaacagctaactctccctgtatgtatggagactttatatatattcaatccttataaaagccagtaacttagttactattattaacttctttttacagagtaaactctgtaaaatcaaaaatgttaagtgacttgttcaaggtcatgcagccaataagggtggcagagtcaagattgaagcccatgcagtctcacttcagggtcagcattcttttgactactttacaataaaaccttcactcaatagatgttgtaataaaaccttcactcaatagacattgttccaagattaaacaactctcacgtcttaaaaaaaattgtaagctcacacattacttctgctataaacactggaaaagatagaaagaagagtctgtctgcacagagtagaaaaccagagcagcaggtacaaaagtgctgggaaaaataataagaaaactgagaagtatttctcttaccaaaaattagtgtgtgccatttttgcataattttctgtgatttatgaagcatccatgccaacttccactcaatacaccaaattagatagcatacctcagagtgagcaaccattgttaagcaaagaccctgaaactctaccccagaaacatgtaatcctgaaccagtgaaatacaaccacctctgcactgacacacaacagctgtttagggtgtccaaggaatggcctgatgaagatagcaaggaaaaactggaaaactgaataccaatttccaaatcttttaaactttattaagctgttgcaaaattcaggaaaaaatatgtaagatatatctttacttttaaatggcaacaggaaattcttgataacttcaaaatcatgaaaactagacgtaagtgctatatgcttgtatgttattcataatttataatttgcaaggccttatcttgtacattatttctttcaattcacaaaataatttggtgagatcagtagaattatcatctctacagaatcagcctctacaaatgaagcttaaagaagataatttcccacagttgtttaggtaggaagtggtgaaacctaaaatcccagtcccctaaaacaaagccccttcccttgtatcatgtggttcctctcaaagaagaaaagggaaataagagtatcttgtgttacagagggagaaaaagtaacagtgactgcaaaatggacaatgactaaagcattggaatgacgggtttcatctctctttctctactcttctaaagaatctccacatttccccctttgaaaggaaaataaataaactaagggatacaagcaataaaaaaataaagaccctcccagttgctttccatccccatgttccctaacttcactcctccactctctgaaccttgtggaacaatcatagcaacatggtaccaccatagttgtgtgatagacactcaaaaaagccccatgactcaattcagggaaaatgccaaaggaaagcccgaaaaaacctagaaaatggaaaataaagcaattttcccttatagaacagcaagataattctctagaggaaaatataatatagcatgactatacagaagcattgcatggtatgctgtatgtggtgaaaaaaaaagtgggggagctagagtctggaaaatggaagaaacatgaaaaagcagagaagcccatctagaatctgttatgcctgcagaattccgtgccacagagtaaataaaaacgcctgcttcagaattgtaaaattttctggggaatcaaggtcaataagcacgtctactctttctcagaaccagaacatagaattttcaacattcatgtgcaaggaatgacaagtcagacacttcattgcagaggcagccactgtgaaaatggccacacaggatatacctgtgatacttctagtcatagagatctttataagtctggtactatgccgttaacttataaacacacggttccagatatggtctcactgttcttctttcattaattcattcggtaaatacatatatgtatatgcttgacactgttctagcttctgaggataaagcagtgaacaagataaaatacctgcccttatatacttgcattctaagtcaaattaaaccacctctaagatttattccaactctaagattcttaaattgcaaacatccctggtagaaggacaatttgagcatttaaaggaaagggaccaccttctagcttcagcatctagcataatgcttagcactcaataaaggtttttgagtaaatggagaaaacttctttagagattgagcattccctaatctgaaaatgctccagaatctgaaaatttttgagctctgacacaatggtcaaaagacatgctcattgaagcattttggatttttagattttcagaagagggatgttcaatccaatatctgcaaatattccaaaatcctcccaaaaaaagtctgaaacttgaaactcttctgatcccaagcattttggttatgagatactcaacctgtattaaagatgtagaaacagatttagttggttaaataaatcacaatggtaggtggtagggctaagaaccatgccctgtctgagtgctattctaggaacaccttataattttgataaaaacaggttaaaactttatttttaatgactacttggttactaaaagtcagtactccaacagttagtctctgcatctttgcttatctgtgtacttattaataccatacaatttaacacttagtttttctctaattggcatcaagaaataagatttgaatgagcttaaagataaaaaaaaaaagtacgttagaagttatctggctctagcctctcacttttcagatgagggaactaaccagataagcatggaaatttgcctgaagtcccacagctaacccatggcagacctagcacaaaaacccaagtcttctgacacttagccagatgttcttttccatcaccacactgtccattctaacttcctcgatggtaggaactacttgttcaatgttttgggtatttccacgaacatgcagaaagtatataatgctactggcatattatattacccaacaaattaactataaagaattttatttttcaaacctgacttttcctcctccctgaaatttctctattccagttgggctaaaaaatttgtaacagcttctgaaccaagatcctggcctaaaagattccagcaggaatttgctaagcttaatgcagaacaagaataactatcctaacattcttttaccagaaaaaaatgtcaggacttacaggataagcccattccaattaggtttttccaaaaaaataacttagtagcccaaagacttgcattttcaggaaaacagcctatctactagcctagctgaaaggaaatcttcctgagctgcacttacaaacttgatctactctccaacctggcctccctcaaagaggtgtcagaggttgcacaagagcactaaattgagggcaacaagactgttctggttctgtcacttataagttatttgacattgggcaaaatcacttatcttccttgtgtttattttacccatctgtaaaatatggataataatatttaccctgattacctcacaaggtaataaggtagaacacatgagcaaatggtcataacatcaatttgaaaagtataaaacaccatacaaatgtaaggtagagcaattaattgctagtattatcactcagaatgactatgtatttcagaggccaggaagctatcttgtaaatccagttagaaaagggcagaggcagtgtgacatagcaggaatatcaaaactttggagtcagataactatagatatgaattcagatcccacgattttgacaagctgttcaaattatttaagcctcaattttcccatctgtaaaactgggattgtactactgtggaactattataaagaacaagtaacacatacttttatctcggccattatccacagttttgctttctgcagtttctgttacccagagtcaaccaaagtccaaaaataggtgagtatagcacaataagataacttaagagacacgttcacataatttttattatagtatattgttatattgttccattttattgttgttgttcatctcttactgtacctaatttataaattaaactttaccacaggtttgtgtgtataggagaaaaacagagtacggatagggttcagtactatctgtggtttcagtcatccactgagggtcttgaaacacatccccatcagataaacagggaagtactgtgtgtgtgtgtgtgtgtgtttgtgtgtgtgcatgcacgtgtgtgtgtatgtatcttgtatggtataaaatagtaattattattatcataaataaatttcctcttctagagggcttagaacttcagggttttatcagtcattgcaccatgtaaacaattttaatatctataatgtaaaccccaccaaccacaaaaacaacattcttgatcaacatagtaaaaaaaaattagatgttaattaaccagcatattagaaatcaggccagagtttaggagccagttctatcaatgggtattttctcagtcactcagacaaactgttgtgcttatttcaaatccaatgcactgaggctttctttgtgactggattgttggactgctgcctgcatttctgtcttctgtgaaaatgccaaatgtatagaaatttcagtcaccagattagatgctcgtcttaacaatatattatgctgtttggtgtcatgttgacatcctgttgacgatgttcatgattttttatgccttcattttgttctttggtttcactaaaaagtaaaaagctcttagactaatgaattcaaactcttttcagacacagtgctgcttcccttccatgagaaaaggatatatttctggttgcagacatatgtggcacagacatgagatcacagctttaagcttaatagaagaacataacaatctattcactgtttacactttagcccaaagggcagctggaaatcacaaccagccatatgcagtgccgaacaagtggtcatgactttattaataaagccaagcattaacaaataagattctgggaatagtacagtgaggggcaggagtctctcaccctaggcccctctaagtactaggcatagggcccaggctattgttcagaatgtcctttgggattagactattctctctgccaggatttcatttgccatctttcatatttcccagttctcccatacagtgtttaatcagctgctggttggaaagggcttcctattcttcctgcatcctgacatcctgaaaagggagcaagttataaaattatctacatgcaactgaaacaaatcgcacatatagatatgtttttgtaccataaagagctatttcaagcagagaaaaagatgcaaataatctctcacttaatccttcccagtctatgacaggtatgggtaatattatccacaatctataatgataacagatattgagaaaggcttaaggacactgcaagcaaattgtagaacaaagatataaacccaggtcaaattccatgttttcaccattcaatgactaccacagacaactgattacttgatagtccatagcctatcatcacaattactttctttctgcattgagatatacacaaatttactaggaaaacttactactcaaagtgaaccactgtttaacactgaagcatttcttacatacatcagtaccacaatttgcaaattttctatctggtcccttcactttctttccatatctaacagatactgtcaggtgataaatttgtaacccaaatacgaacatcataacacaagtgtaagagcataaaaccatcaaaacatgtacaagccttcatcgaagtgaataagctctattaggtcagcagaaattaaataatcaataactcttataaagataactacaccccctaaatctataaaaatttaaaaatgtttaagatgactgctcatatagatggtacaggcatctgatatttgctagaataactagttcatccaaagtgaagtttattcaagtgtaatgggtagagatagaaaatctaaatctacaggttagctcctcagacaagttctaagatatagtttagactttgagaaggcacattttgcttctatgtatgttctaattttggttttgttctgtttctgaaacagaagtgaagttccttgttttgaagtatactgtctttttatgagaattatcactttcaggcttaatatatcttcagttttcaactgggtccaaatgaagactgaattcagaaaaacaagagcagaggaaagaacaatgttccaaatgcaccctccctcacaccatgctagatttatgataggctagaagagacagtatacatactgagatctttaatgatgccactggtggcccaagtcattcacaaagttatgacacaaagcgtaaccacattttctcccttggggcttaaaggaaagaacctactcccaaagtacagatagtactgcgtatccacagtatgaagcaaaaggaagaaagagaatagcccagtgaagtgcaagatttatctcagataactttcccaggaattataaatcaccttggaagactgctctcaatctcaccctcagcttagacacatcacaaaataaaatgcatgatttacaaattctaggagcttatcaccacaacagtgtgaatcaaaatggcgcaatggctaaaatttccaaaggactaaacaccaatattagcataaagagaaactgttatctggcaccttgaggtttgtatatatacaaataatacatgtacattataaaagtaactttcctaaaaagcattaaatctaatacagtagggaaagtcttcacttatcatcagtgggttcttggaaactgaaactttatataaaacaacctataacaaaaccaatttttttctcatagttataacaaaacattattaatctcattattcagggacttactgcatgtcttttcacttaaagtcgcggcttccatgaacctattgatgatgttaagtgaggacttactatagtctcttacttgtctattggccacgaaataattcttcaattgactagcactcccattatgttttgcaaattatagcagacaacagaggcatagcaaaaagatcattgaacacaataaaactgcaataaactataggtctctagtctgtttctctccaatatctagatttattaaaatttcagattaaagagggaaaagatcagcctagccaacatagtaaaaccccatctctacaaaaaattcaaatgttggctaggcatggtggcacacacctgtagtcccagctactcagaaggctgaggcatgtgaatcatttgtgcccaggaggtcaaggctgcagtgagccgcaatctcaccactgcactccagcctaagtgaaagggtgagaccctgtctcaaaaatcataataataataaaagaattaaaaaatgtcttttcaacaaatggtgcttggaaaactgtatatctacctatttaaaaaatgaagtttaacccttatcttatgcttatttttaaaattaattgaaaatgaatcaaaaacaaaagctaaatctataaaactcagataagaaaccttagaggaaatcatcatgacattgaagatttcttaaatatgacacaagcaacaaaaaaaatcagataattggatttcatcaaattaaaaacttttgtgcatcaaagtaaactatcaagaaaatgaaaagacaacccagagaatgggagaaaattttgcaaatcatatatctaataacgggtgagtatgtagcatatatttaaaaactgctacaactcaacaacatcaaaaacaacaacccaattcaacaatgagcaaaaatttgaatagatatttctccaaagtatgtatataggccaggtgctgtggcttatccctgtaattccatcattgagggaggtagaggtgggaggatagcttgaggaattcaagactagcctgggcaacatagcgagactctgttctccacaaaaaggaaaccaaccaaacaaaaaagaatgtatacgaatgacaataaatatatgaaaagatgttcaagatcatcagtcattaggcaaagcaaatcaaaacaatgagataccacttcatgtccattaggatggctattactaaaaaaaatgaaaaataacatttgccccatctacagctaactccctattcaagtaattcctcaaatgtcatattctcaatgagttcttctctgatcatcctatttaatattgtttctttccaccagtctcccttactctaatctctattttttctttttctatagcattcataaactcctaacatactatataatatacttacttgttatgcttattgttgtctgttccatgagaactgaaaagtatttgttttattcactaatatattttaagtacaagaatcaattaattagtttcttgcctggagatagaaaagagtttaaaagttttgtaaaccaagtcattctttaatcagttcttatcctcttcaacaccaaatattatcttccatttatcattaacaaataaccaaaatacaatggcttaaaatgtagtgagtgttttacattactaattatttcaatagaatgaggtctcaaaattttattcatgccctaacattcacagtgtatatgccagttattcatttattgtctcttgattccatatcactcttcaattctctgccttgtgatgctggggcacgatatttcccagacttcattgccagctggcttcctgtcaggttctgccaatgagagagactagtaagaaactagaaggtgggaagagacaacggacttccttcctctaactactgtccatcatccctccagcagcaaaagacatttatggctgcaccatttatgtttccaccagcaatggcttctttcagccctcccaataccagctgcctaagcccctcgcaagtaccagcaccagctggccaccatcctctcagtgattacagcataagccatgccatgttcttctcagtggtctgaacagaagtcatggagcacatcctccccatcacaagtccaagccccaatcacaagcttttccaagcttgtaggtttcagtaacacaaatttttccatttttttccatcagccccatggctggtagctgcttcatacagttattaatatctgggttacctcagcctccttttttgcttttttagttttccaatgcctatgtaacaaattccttcaatgaaatcccaagtatttgaacaacttatcatgttttttgtcctgactagacatggctatatctggtagagtataacacttcaggcagaccaaaagattgacagcagaataaatttataattttgtcccttagaatttatataattcagatttgttatattatcttaaccaaaaagttataaaataggtctttaaaatagaaccaaaaaaatggattgagatccagaagtgctatgttcatatctgtacactctcatagagtttatctccaacccactcctccctcttgcctactccatatctccatttggaggtctaacatgcatctcaaacttaacaagtccagaactgagcttttgatattccctctaaaccctgtaccttccaaagcctttcccatcttgcttgcaactccatccttagcttctcaggccagaatcctagagtcatccttgattcctttctttctatcatccaacaaatccaatctgtcagaaagccccgtgagttcttcattcaacatatattcggaatataaccacttctcactacctccactactactcaaagccaccaagaactctcacttaggttactgtaatagccgcttaagtggtcaccctgtttctactcttcttcatccctataatttattcccagaaacaaccaaaatgatccttttaaaataaacatgagtcagatcataccacttctttgctcaaaatgttccaatggctccccatctcccacagagtaaaagccaaatcctcacaatgacctacacattcctatttaacccggcccctgtcatttttctgacttcatttcctattatttccccccttcactcatttgtctccagccactctgatctcatccctccctgtaccttgaacataccaagcacacttctacctcagagtctgcactggtccctccctctgcctggaatgctcttcccccagatatctgcatggttccctttctcttttacctcaagtttttaggcaaaaattttattctcaatgataccctccctgactatcctatttaaagttgcacatatacctccaccctgggtgctccctatcccccttttttgttttattttctccatagcatttatcttctaccttgctttataataacttactttttcttttttttaaaaaaaaataaattgcctgtttccctctactagaacgtaagctccttgagggcagagatttctgttttgatcattgatgtatctccaatccccagctggtgcctagcaatagtaagtgctcagtaaacactgttgaataaaattccaaactccaaagcgccaaagaataatgaatatgtgtacatagacacattatgtgatacatgttgcatatgtataaatactatcttgccttcattctaaagtgtaaaattgtattacaaactctaatattatagtattactacaccaaaattactacgtgcctttgtttttactgagtcacttgagatcaggtgtagaattttctacttctggcatcatatcggcactcaaaacattttagattttggagcatttcagattttggattttcagattagggttgctcgacctgtaatacatttaaagaactttagcacaatggctgggtcatagataatactcagtatatgttagctaatattattataaaaggcacctaatatttgttaaatgacaggtaaaacctcccaaattcaacattttatactgccttaatttgtttacattgtgagtgtactgaaagcaagaatcatattttatgcttcttttgtatctggcattgtattgaacatattagttcaataaataattagtttattgattgattaatgacatatattgttaaatctcctgaaagtatagactgtgaaagccaggtaactcaagatgaccagaataaataaaacaggacctaagaaaagcaagttattcaattctgcatcctcatcacactaactaggtatgatactaaagtataccaaatacttatttttaatatataatagacatatgtatattttctagtagaaaaggaataatgataagttaatggcataggaataaaagacaaaaagaaagaaaaagtagagacagatggcagactttaaaattgtagagccaactaatcaaggttgttagaagtcaccagggagagtaaagcactaacagagacttcagttgacggcaaagggtgggactttgttggaaaggccacttctccaaaacaccattcacagataagcccagttgagtgacagctataataactgactccaaaatatacagttaacgactggtcacaagaagctagaacactgatttttcacaggagaggaattgcagaataatttaaataaaagcaaagtaataagagaataaaatcatcattaaccacccttgagatgttgatggagagagccagtagagattagtcaatttgatatcaccagctggacacgtggatggaacaactggaactgaaagatccttagaaaaaaagtaaaattaaggttctgatataaaaatgttatttcatttatatgaatccctgcccatcactaggaagatttcattttttgtccttatgccataaaagttcacattagttagtgcgaactatgttcagaacttgccatgctcatacatatgatataaccatttttttcgcaaaggtaatttcatggtatgtagatatatttaggaagaaaaaatagtgagaaggaaaattggcattgtacagaatgttattcctaatagtgtgttagtatatgaatacatatacttctataagcaacagtgcacaaaaataaaatttcatcgtaaaactgtggttacggcaaaactatctcaactttttgtttctaacatattttcatccttcacaggcagaatgacaaccacaaaggacaattcacgatatgcagttctatatgtctacaaaatgtaaagcagtaaattctagacacatgcctaaaagagagatgtgtcagcagtcaatccaagcaaacgggtccttcttcagtttctgtcccactgtttcagatgccctgtcttacctcactcttcctttcacactttgttttgttccattggtctaacttccttcttggggttactctttcactactaaataaacttaaactcctacaatattagatagttcttatcatctgtaacatcttcccttacagctctagaaacagtaaatcttgcaagtaagtgatgcagtatcacacttgagaatttaatttataggtttctataatttccagagatacaatcatacccaggcattgtcaattttttattgcaaaagtttgtaggttttctggttgatatgtgcttaactctaatccttaagaataaaagtaaacaacaaatacattgaataaacacatatgtgtatacatattatatgttctgaacattattaggtcataaccatgctgaaatgaaaagaaagggggagggagggagggagagaggaaggaaggaaggaaggaaggaaggaaggaaggaaggaaggaaggaaggaaggaaggaaggaagggagggagggaggaagggagggagaaggggaagggagggagaaggggaagggaagaaggaaggaagctaacttatctttattaatacagaaatgtagccctcagtatagctaataaatactcaaggctgtacatcattgacccatctttaactcaatacagttactacagcttccatgcagatattatctcaaaatattatgctatatcatactgacttaagtcataaagccaaatctttctttctctgaactcccttatgtgcctcttcattattcagaacatcctggactgcctatgaactgaactgggaattacctcttataaaacactaaaaccccatggaagtatacccaaaaaataaggaaacctgtaaaacctattccaaatgttttcattgtcaggaactcacatcttttttagctcattagaatctctggtaattataacatatagtaacttttagttatattatcactaattcacagatctgcagttttctttctaacccttctgcattcttcagattcagagttattcagataaaatgatggcaatgtatttcaaaataattttaaaaattaacttctacatttatgcaattggtatttcaaatatcacacgtggaatacatttttaaacagaaaaaaataatattaatgtcattatccttttctcctatttagcaccctaagagtgttatttaagaaacacatgccacaatatgattcaaatactttaaataataaaaatgttaaaaacatgtggtgaggtttctttgtaatgaaaaaacaaacaaacacactcacatggcaaaaagaattatgtgcctgtgataaatttatccactctattcttaggcaatgttctatactccataaaatccaagaaacaataaaataaaattgtgtttgaaagccagacaaatacttaaataggaaagagcaggttggtttttattcctttcatattcacattctctctttcccatctcactcttcaaacttctctccacgatcatttttgttattattgacatttctatattttctatcactgttttaaaaaaaggagacaactacagtccaaattcataaaatgaaagtcaaacttgatgcaacactatgcctattagcaacttttaagaatggaacttcaaaatgaagcaacatctaacaaaaaaaaattactgctgccattaggtgttatataaaaaaataggtataaattccaacaactcatgtgaaaaaaagaagcctcagaagtttactattattaactaacacttcaaagctttttcaaactttctagcccacaccaattaatttgccacccaacgcattcatacaaaagttatacatattattaaacagaataatgacatcttctcatcacacctaatctctccagttgaaatcagattttttgcatcactgaaccagagagattgttacaactgaaatgaaagtgaggcctagagagtttaaacaatttgttcaagttcaagtaattagttacaaattagtagcagagttaaaattagaacccagttctccaaactccaaaacaccaatccagatcttgaaacttcaaagcactaagtgttgtacagaaaagaaaaaaaaaaaagagaagaaattgtcctggtcctaaagaattcactaaaactctaaagttgcatatttctgtggtgaatattatttggtgacagtaatggatgcaattgaaaagctaaggcaaacacatttttttaaagatttgactaatcccaaataatttaaagagctaatgcacacccagcaatcccaaaggaatataaatccttctgctatgaagacacatacacacgtatgtttattgcagcactattcacaatagcagacttggaaccaacccaaatgcccatcaatgatagtctcgataaagaaaatgtggcacatatacaccatggaatactatgcagccataaaaaaggatgagttcatgtcctttgaaagaacatggatgaagctggaaaccatcattctcagcaaacacagggacagaaaatcaaacaccgcatgttctcactcataagtgggagttgaacaatgagaacacatggacacagggagggaaacatcacacaatggggcctgtcagggagttgggggctaggggagggataacattaggagaaatacctaatgtaaatgacaggttgatgggtgcagcaaaccaccatggcatgtgtatacctatgtaacaaacctgcacattctgcacatgtatcccagaacttaaagtataatgataataataattaaaacaatttggttaattccaaataatttctgtaaacatgtggcatacctaatgtgatttcttttcttcctggatttataccttctaaattagattggcttaaggtcaatattaaaataaacttgcatcccaaaacactagcaaggagtgggagtagagatgatagtggaaatagagagagagaggcatccagaataaaaagatgctagctgccaaaggaaagtgatcctagaattagaaaatggttgtactcaatcctcaagacataatccatgcatgtttgatagagttagctataattataagtgaaatcctttgccgacttcctctacactcctgccttttaatggctaaagcctactttcagaagatgggtaccaggaatacaggaagaggaagcatatgcaaattgagttttaaaatcatagcactcttgctgatagtaagaatttcacatgatctctataaggttaaagtaagaaaatgaggaaagaattcctcatggtcatcactgaaactcatgactacattctgcagacccaggacagatcaacttaaatttcccccaggcaactgttaaaaatggggaaaacctactgcactatagatagaacatttagacttcagaactgacaagcgtatatttttaaggactcactaaatttaagagaagagaagggagataagggaagggaaaggagagaattggggtgacagggaatatatgaagtagaagagaaggaaaaagaaaataaaaaaaagaaagacgggaatattaaggagtgctatctcaagaaatgaaaacctcataaagcaacctacaaaggaattcttttatttaaaaaaaaaaagtcaagttgttagttacagagttattgaagatgttggcatttgtttcccaacaaggaggatttcaattttaaaatatagtgataaaaactatatcatcaggattcagccttattctctttcagtagtatatatactgcatcaagagaaggaaaaagaggaagactgaaaagtgattaagtagataaataaaaactgcaggaaccagggtaaagccgtttacctgttagcttcttactgtacaactactcaaaactgtaatgttagttttccttgtttatatctcagttcccagatatgcaaggacaaaaattaataaatatgaattttctcctccaccagaaattgccactttaagccagttaataataggaggagtgaggttgttcatgctaggtaccactgaaaatattttgtcacaaaaagaactaaaatcaaatagacatagaaactacataggcaaccaacatttgtttttatcagaagaggggaacaagtgatttcactgtacaaaaaaagaaaaacaatttaagatggaaaaaaacatccacttgaagacattattctaaagtaatatttattgttttcttttcattgttattattatctggttcctgcacatgtgactctgcccaagcatggagaataacatttccattgattgtgttaatatctatagcagaagagtcaggattttactagaaattcaacaatttcgatgtatcttttacctcctccatacccagaaaatataaacaagcatttaaaaagtaaaaatgtttcttttgccatgagatattaatttcgaactcattagaaattggaactgcatcttaccatgaggagacaaataagctgatcaaaacactacggtttcaaactgttgggcggagcataaattggtgcatgctttcaggaaggcaacttggcaaagtgtatcaaaaccagtaaaaattatcttcgaactagctatctaggaatttactccacagatgtcatcataataatgttcaaaaatttatatgttaaatatgttcattaaagtattactcatgatagagaaaacatcaaaacaacctaaatgttcaacagttagtaagtactaaaacatttaacatttattcaacaaacatgtactgaggcctactatgtgctaggtattgtggattcgttaaattaaaaatgtgtccttaaagtaaaatacaatgcatcctgagattttgtcataacatcccaaattgttttacaaatttagtataattctattaaaatcacagagatttggaagtgggggtagggggaaagacttgataaaatgactcaaaagttcatgtggaaaaacaaatactcaagaataaccaagataattttaaatgagaataattcaattaaaaagcacataaaatatgaataattaaaatttgccaaatgaataggcagatcaattaaagaagctaaaaaatagacccaaatatccctataatgaaaatcatagtgtttaaaagatgaatgatatgactaacattgttggcataattggttcttcatatcttaattgcatatcacacaacaaaataaattctagatagattaggaaaattaaaggtaaaaaaataacattataataaaatatatgtgaccacttacataatgttagataggaaagacatttctaaaaatggttctaaaggcagaaatcaaaaataaaactttagatttcatgagagagatttgattttctaaaaattttaattagacaaaatgacaaaatttaaaaaagtctaaatcatatatgacaaagggttactattttagcatataaagacctcttataaatcaataagaattaattacccattagaataatgtacaatactttgtgataggctattctaaatattttttatatatattcatgaatttcatccttgcaacagatctatgacataagtaatattattattcccactttacatataaggaaactgagacactgagaaattaagcaaatgctcaagtttacagagctgttgagtaatgatgacagccaagattcaaaccctgtcatcaacaatctgactccaaaatctatactacctctcaaaggttatgagtaagaaatttatttttcaaaaaagaaatgcaggccgggcacagtggttcatgcctgtaatcccaacactttgggaggctgagacgggtggattgcctgaggctggaagttggagaccagcctgaccaacatggagaaaccccatctctactaaaaagacaaaatccaccgggcatggtggctcatgcctgtaatcccagctacttgggaggctgaggcaagagaatcgattgaacccgggaggcagaggttgtggtgagccgagattgtgccattgcactccagcctgagcaacaagagcaaaactccatctcaaaaaaagaaaaaaaaatgcaaataaataaagaaatattccatttcactactaatgaaagaaatgcaaattatactaaaaataagatgccattttctagttgtcatattgacaatggttaaaaaaataataataatgtgtcagagtggatgaggaaaaatgagtactcttatacactgttgacaagagtaaactagtcaactttcctggggggcattttggcaataggaatcaaattcctttaaaaagggattacccaacaatccatttttaagaatttaaactaaagaaataattacagatgtgtgcaaagatttagctacagatgagtttactgcaatattgttaataataatggagaatcaaaaacaaccttacctatagatgatcagctaagctatgaaatggccacaatagaatagtctgcaaccattaaaattaataatgtaaaacaacaggtggtatcatagaaactgtaaatgatataccattaaattaaaaagtagattataatataatataaatatttgataccatatgatctcatttttgtttaaatatacatatatgcatattagatagataggcacagacataaaatcttcaatacaaaaagtgtatataccttaatataaagtgaaaaggtttttttctttatttttatatgtattgcctaaatttcttctatataatatctgttacttttatagtaaacaaaaagttcattttaaaaagaaaaggtaggtaggagaagagaatctgatgccatagggaaatgctcacatgttaactttttaagagtagcttgcaaaacagcatgtgcaataagatcccatctttcctttaaaaaatatgtgtatctaaacagaaaaacgtcaaggatataatcagtataaacattctgaggtatccctaaatgtcattacagagcttttataatttctttttcatattttctgactttttccaataaccatagtttggttttttaatcagaaaaaaaagtaataagaaagaccatatttactcttttatctaaatccattctaccaaccaattgtttaacaagtccataattatggctaaatgcaaaaaaaacaacataataacttcttactgccaaaacaggcacaaataagtatgatagtttttctaaaaaaagcaaatctcataaacttattggtgtattctatccaaccaatcataaatttaatttaatgatgaaaccacttacatgtcaactatatcaagttgcaaatgagacataaaaagcaatcaagcaaatcacctctatatgtgtccatctactaatagataggtagatatagcaaaataagacaattgtgaaataattaaacagatgataaaaataacatactgacactggtcatcaatatagcaagacaaaaaataaatgaacaggaatcaattaattggcagtgtggcattgccaaaagtcccggccctgatttctaaacatatgatcttgagcaagccaaataatctctccaagttttagattccttgtctttaaacttacagtaaaaaaatagattctttagctttataattatagaaaaaattgatacaaatgtaaagaatttccatatgactaagctaacataaaccctacaatacctccaaaattagtacttacttaattaaacacagatgaagatggtaataccatgagacaaaaagaattttagaaagaaagaagaaaaatgagaagagagaaaagagctgacatccttgatagtgaagaatttctgcaatagggtatcaaggctcaggaaaactcagtagctttttcttattccagaaaaagaactggggaccaaatttctacattttggctgctagcctcaagcctaactaatcacccagttgcacttctgcacatggaaaagctgatagagcatcaacaaattctttatcaaaataaacactttgtaacactgagaaaattaaaagtgttgtaatctataaatggctcagcctgttctgttaaaactttatcccaattggacactatgcttaaaatatgttcaatttttttttctttacctctgctgcaattttttaagtcacatatattttcttccatctctagaaagtaagtttgtttttataattttccagattatatttatatacattcttcatgaaaatatgcataatatagtcagtttcattctttttctctccaaaagagaaaacatgcttgaaaccttttctttttcagtacaaaattctagtctcacacatcatctttcaccgacttccatatctaaaatttcttcttattcccccactccctcccaaaacccaaacatacacacacatacacacacaggcagaggcacaatgaacacaataccaaagttttaaaaataaatgtttagacataaaaacacctgagggtgacactaagttgtaagctatttctaaaacaatttgttaaggtagtggggaaaaaaaacacacacatacaatagatgttctaatcaaagtctggtaatttttctaagtgaatgttattaaccagaataataaaccaccattaaaataggccatttcttacgtttaatcattataaaagaggagtaaaagtcttaaaaagcaaagtttttgcttatcaaaatgttatttttactttaattattaaaggttctctggatatcacagggttgcttctctcccaaccatcatcaaaacattcagaaaatacctttgtcaaatacggtgtcacttagcttgtaaataacaacatacttggcatctgtacacataaagaacagcctaaatgtttaatcaaatacctcgacttcaggaattaacttcttgcctttgtcctttggtggccacgatatcttcattggaagcgtctattgctgtcattatttctaattgaaatcatcctctacctccacacccttccacgaaggaaacatggcttttatctttgtcttgcacatgcacacaacagagggagggagaataatttgctatttgcactttcaataataaaatagcaaattaataaggagtgctctctattataggataccaagcaagttcaacactcaattcagctgttgaaaagaactgcactgtaatgcttttacctaatatagtatcatattttcaaaaggcagaggaaatctctcaacttgggggaaaattatctaaaggtaaagagatgctatatttaattcctcacttgaagcttgtgtctattctgaataaaatactccaattttaggtgtttttgtgcttagatctaagaaatggacctaaaatgaagttagagagttcaatgtggaatcattgtcaactccagggtagttgtactagttgtactagtaatggcagagtcaggattttaacctaggcagactagctaaagaccaagctcttaaccgcaacttaatctcttaagcaccattaaaaacaaaacaaacaaaaaaaaaactaattaaaactttttgctcccttttcatggataatttgaagtatacattgagattaaatcctgttttcctgagaaatgtagctatacaatggtgtattagcttctgtgtaagtatcttttgatataggaaatttagcaaagaatgcactcacgattccatgagtcatgaaatagagacttctgtaacaataataagaattgctctttccttcataaaatgtttaaagttcattcttttaggattaattcagcataaatattgagttccttagactcttccacacttatgtcactacattgctccatagattccttatacagcaacatccctataacagagcaataagaagaaagagaaaggcagcaaaatccaaaacagatgtctcaaggaaatacattaaagcttatttagttttcttaaaggagaattcctcagctcagaatctatttactcttacttaagcataactgtagcataattttaattatatgaggagcacacctaggttcaaatcctgcttccaccacttaccaataatataatcttgggcaagttgctcaacttctctgagtccaggtatctttatctgtacaatagttcaacttgctggagtgttgcaggaataagcccaatagatacatgtaatgttcttagcacagtgcctagcatatactaagtgctcaataaatggatctttaatacccttaaaatatgaactaataacaattcaaggagttattttgagaattaaatggcatcacatgtaaaagcacctacattagtgctgtacaacaaaagagaagcctataaaatgttagttttccctcttttcttatctaatttaacagcccatagccaaatagaagtagcagctaataaaagagtatgggaggaggactgatattgctaaaggcaaaaacactaattacagagaaatgacaacttcaagtctgaaaaaggcaaagataggaaaccaaaaatgcagacacaagaactcaaaaaaaccccagcaatttggagaccactcaatgtagagataaatagccttaacagacactcaactcagggaacagctcaggaatcagatgtttgtagtgatagatgagccattgagaaacgttgttaaaaaagtaaatttaaaaatcagaagataaaactatgatataacctcaccctcatatatattataccaaaatattaacaggaactatctctgaaaatgaaatataggttattttaattatcttctttaacctttctattttttctaaacaagaaactttaggaatcagaatatatagttaaaatgtaaaaataatgttggcacttaaggaggaagtctttagaaacctaagaaatacataaatgtgcaataatagattaactcattctatactgagttccctgttcaaatcacctccatgacatcctagaagaataaaggtattaaaataatataacataagagaaaaatttgattagttgttgcacaataaactcacgtgaaaaagaaaaaatgctaaaagtagattcatcttaaagatactattttaaatagcagtcagtatcaacacaaagcttataacaaaaaccacatatgattacctctgtctttgcttgcaacaattctgacacaccctcaattttagagtaaaaaaaaatgtttaaacaactctaggaaaacatagaaatgaactgataaaattgagaaatttcaaaaagcatagtcataagggaaatgcacctttttacattctaaaatagaaataaaaatgcttttggcaaatttagctattaccatgtaatcactgacattgaacaacgggaaaaaaagaatggcagcatagaaagcaaattaaatatcagaaaagaacatactgctttttatttctttctgacctgtagtatctatctctctttggaattgtcccactgaagaccatgtacaattaatagagaaaatgccagagagctatacagcagatcctagaggactttttcatctggaaaaagggcatctttccagaaatagaaatcattttcctgtttcttcattaatcagagctccaattttaaaagagtgaaaagcagaataaaaaggcacaaagtactaactaggacattgtaaactctcaattacttcaagtactgttgttattattatcagaagtaatagtacagggctagtacagatttgagatgaactaaatgaaacagtcacacagttaatctgtggcagaatcataactagaattcagattatgtgcttccctgatcccaattaatattcagttcaccttttctataatttcccccaaaagttgacatttccaggtctaattgtcactttagctgactcagctgtgactatttcatttcttttcttggattctgattgtcagtgggttaaaagcaacatataacatttttaatatcagaggcatctatattttataataaaaagagggtaagtttaaatcatgcctgtaaaatgtttattgaagtgcattttatccttgggaaataaacaaaaatgctcttgaggtatgcttaatctcagtagtgtcattattttcatgtcttatttccatcacttaaaagaaaaacttttcagtaaacagaaaagaaaaaattttaaaaaatcttttctttattattatgttgggagcatattttaatccattttaaattggatacacccaagtcttagaaatgcaaactcctgtgatcacaagagacgctaagcttttcatgatgcttaaaaggaaagaagggcataataaatatgtttttggttctgattcatattttgctcttttgaattaattaatgctgtggaaatcccaggcaactgccacatcatttgtgactgaattgagtccaaaggagaaaaatatgtaaaacattatttaattaaaattttgcattttttttctctcacagttcctttcccactagctaatagtcattcaaactaagaggatagtttcatgtttgttgctgttgaattgccttgggccacattaacatgttcagaggtctgtggtatctggagccatattgttctctggggccagccccttgagtatggctctcaagctcccccagccttatttcaaagctgtctttggcaaaatgtaatgctcatagggagactctgcttgtattggtatgcatatggcccttgaggaatattagcagagttgttgttttttgttgtcgttcttatacatgtggttttgcatttagcttggaaagtgggataataatgagaattgaaggagaaatctattcaacttcaataattttaccttaatgcaggaaacacaaaacaaagaaaagtttactttcctgattctaagttgagaatatcacattggaaaaaccttttttgcggggggcaggtggggggtgaagtaactgagtcatggccctgaaacataaaatctaatcatgtcaatatcctacttaaaacccttcattatttccccataacctacaagatacagattcctgcatatagatacaacactcattaataagctgattccacattatctttctattcctatttcctgacacatatacacacacttagcaacataagacctgatcttctctaactgttctctgttgaatgttctctaaatcatcttccctgatatctgttcttagagcttgcaagcttcttttctatttatggccctcataaatactgttccctcttctgtctcctcttcaccaaactatatcctacttataatttatgtctcagctttaataccactaatgtatagtcaccatccttgatcccaaaccgaattaggtctcccttttccttcatagtatttattatcctacaattaaatatttatttaatgccttcctcttatttggagtgtaaactagagaaaggtacgacatacattttagttcaccactgtattcctggcccatatatacttggtactcaatggatttaggagattctctcattatccaaatattcattatgtgagtcactaaaattatacaaaaggtaaaaggcattcattaataaacttaccatttgtaaaattagtcttcacgtaaacatccctcacagattaacttaacatgtatctcacacatgtgggttaatgtcctcgtatctttgatcatcattgctcagtggtttcaaacttgtcagcacattgaagtcacatggagacctgtaaaaactattgatgcctgggtcccacttcaaaagactgatttaactgattgaagtgtaacctaagcaaaagaatactttttaaaatgccatatacctgtaatttttttttcagtcaagtttgagcatcaggctagtcaattaccagatattgcattgtggcattgaaaccactattcaaaataaaaatgtaaggtgactgcaaagcaaaatcacaaatcttgcaaaagatgcaagatttcatgaagcaaagaaatatagtgtcagtgaacagctcaaaccattgaaaaatcaacaatttacagttagaataagataaaagctgaagaaccagatagtggcaagcatgatagtcaatatggtagattattcataaaagaattatttgaatataaaaagattaagcaaagtccttagaaaattttctttacaaaaatggcctttgttatgacagatggtactagagtgtgaaaattgattttgctttcataatatttgacctgaaaaattactcttaaaaaatgatcactcttctaagaattaatgcacagttagaattataaatgaatgctgccaatatataaacttatttttactaattttaattttaatttgtaaaagttgactcaaaatgaaatcatttttcccattgtttactatgcaattttgatccccacctacttaatatattaaaatacaaaagaaatcatccttgtatcacatgactttggcaaagatacaatcctactttttacctcttatattattatactatttgctttcttgtcttgcctcattctaatggttggaccttaaatacaatgtcaagtaggatgaatgagcatggacagtatcttgtttcctatcttgggaagaaagcattcactatttcaccatcaaatatgatgttagttgtaggtttttcctagccatccttttcagataaaaatagttttattatattcctagattgctgggagttttttaattattaatgggtgtggtcaactgttttttctgcatctattgaaatgatcatatgatttctcatttactctgttaatacagtgacattttccaaatgttaaaccaatcttgtatttctggactaaaccctacttggtcgtgatatttcatccttttcctacattgctggatttgctattgttttgttaaagatttttgcatctatgaccatgaaggatattggtctataatttttctttcttataattttttcaggtttggtgttagggttatgctggcctcataaaatgaggtagaaattgttctattttttgaaagagtttatgtaagagtgatgttatttcttaaatatttgatagaatccacaagtgaaatcatttgggcttggagtttcctttatagaaatttttattttcttaatgaacaaattcagtttcttatcttgtgtcagttttagtaagtttttttctaagaaatttgtttgtttcatcttagttgtataactttttggcatacagatattcacaatattttcttattgtctgtttaatacctgtaagatttatagtgataattcctctttcattcctgatattggtaagttgtgtttctttttttcttggtctttacaaaagaaaaacaatttttgcctgtacatttttcttgtttccagcaatttgactatgaggtgcctagatgtacttttctttgcatttatcttgcttggagtttgctgaacttcttacgactgtacatttatatcttttgccaaatttgggaaattgatggcattatttcttcaatttttttccctgccccaacatcattctcttttattttctgggactcatgtatgttagaccttttaatattgtcatatatccctaatgctatattcatcttcttttcttttccaattttttctctgttgttttgtggttttttgtttttgtttttaagagacagggtctcactctgacaaccaggcaagagtgcagtggcaccatcttagttcactgcagacttgaactcctggactcaagtgatcctcctacctcagcctctcaagtagctaggactataggttcgtgtcaccaccctcagctagttttattattttgtagagacagggtcttgctacattgcccaggttggtctcaaacttactagtctcaagcagtcctcctgcctaagcctcccaaaggagaggtgacattgtaggcttgagccaccatgcctggcctctctgttctttaaattgtataattctattgatctatcttcagtttcactgtcatctctattctgctgattgtcctctcaagtgattttcttatttcagatatcgtttttttaagttccctttggctctttttaataatttatctctctctactgagatgtcttatttttttttcaaattttcctggttcttcatatgttgagcaattttggattatatcttagacattgtgaccactatgctgtggagactctagattcatttatagtattctaaatagtattgcagtttaagaagcttacggccgggtgcggtggctcacgcctgtaatcccagcactttgggaggccgaggtgggcggatcacgaagtcgggggatcgagaccatcccggctaacacggtgaaaccccgtctctactaaaaatacagaaaaaattagccaggcatggtggcaggtgcctgtagtcccagctgttcgggaggctgaggcaggagaatggcgtgaacccaggaggtggagcttgcagtgagccgagatggcgccactgcagtctagcctgggcgacagggcaagactccgtcttaaaaaaaaaaaaaaaaaaaaaaaaaaagaagcttacttgctgagactcgaactgcatattttgtcttacctgcagtaagcagtagctcaaacatctatttagctcttttaaccttacttgggctacttgagatcaatcctgttcgtggatggtttggggatcagtcagagatttgtaatatagaagttggggttccctttctgtggctttttccttcccaagattacctcctcacctcttagcagttgtggttgcccaaagtctgttgccttgattctccaggtcagaaaaaaatgctgctttttttgcagccggccctcatactagaaagcttgaaaatgacaaacttacccagtttctttccctgcattcttccaaagctcattctcctctcaagatttagtctgtttcaagttgctcttcagtgccttcagatagttgtgttttgtccagagtccatagttgttaccctcactcaattttcagtggattaagtggccctttctcactaccaactactctctgataataaagatttcttgtattgccttaaagacatattaaatgataccatgctttttcactccttcatgcctttacacattctattcctttgcctccactgtcctttcctttgatctgttcaatgaaatgttagtaagcctttaatgtttgatctcaactgtcacctactccatgaaaaccttccctgactggaaacaacagatgctggagaggttgtggaaaaataggaacgcttttacactgttggtgggagtgtaaattagttcaaccattgtggaagaaaatgtggcgatgcctcaaggatctagaaccagaaataccatttgacacagcaatcccattactgggcatatacccaaaggattataaatcattctacaataaagacacatgcacatgtatgtttattgtggcactattcacaatagcaaagacttggaaccaacccaaacgtccatcaatgatacactggattaagaaaatgtggcacatatacaccatggaatactatgcagccataaaaaaggatgaattcatgtcctttgtagggacatggatgaagctggaaaccgtcattctcagcaaactatcacaagatcagaaaactaaacaccacatgttctcactcataagtgagagttgaacaataagaacacatggacatggggaggggaacatcacacactggggaacatcacacactggctaggggagggataacattatgagaaatacctaatgtaggtgacaggttgatggttgcagcaaaccaccatggcacgtgtatacctatgtaacaaaactgtaccttttgcacatgtaacccagaacttaaagtatgttaataaaaaaaagaaaaccttccctgactactcatctagttgttcccatccctgatttacccaagctcttgtcacattattcattagtttatgtgtctgtcttgctgacaaatttgtaagattcttgcaagaatcatatctttttcattatatcctctttgtgcctggcatatagtaggtacaaattgatgtttagtcagtgaatgaattaattcattattagtaaacatgttcctcctcagccagtcattaaagaacaatgggtgaaagaggcactaagtcagtcaacaccttcaacagccttcagattgggaattaaacattcagtaagcaatacaaataacatataagtgaagatgaaaatgagtatgtgaaagatcatatttccttattctttcaatcctaccctcatgcaaatgatttaagagaagatgaaaggaagggagaggactaattattaaaggtccactgagtgctaggtgcctttatctttctatttaatttttataactctaccaagtagaaattttctatactgattttatatattttaaaagacaccaggttttgccatcctcaatatttaaatacctaaaatttcagttgagaatatttaaattggaaataactcagatgtctagcaatacaacaatggtacatatatagtacaaaatattatgtagaaggaaatgagataaagctatataaaatgacatagagctccaagccataattttaaatgaaaaaagcatgtaaagtataaagcaatatgtgtaaaaggggacactgttaccctgacacgaaataaagccgcatgtttctatgtaatggtatatatttgtatgtgattgtacaagaagtctgaaaggatacaaagaaaattgaaaatagtagttacacttgggaaaagaaacagtctttagggtgagaaaacacattaagaaaaattttgctcatctttttttcaataattattaattcaacaaatgcttaatgatagtccactatatgccaggcactgttctacaataagaatgtatttgtgtcttacttgtctaaatttaaaatatacttaatgttttaaatgaaagtattacctcagtaagagaaactaaaataacagaaaatctctaaagtgcttaaacatgtgatctattatctttttaatgtgccagaagatcagaagctttttaaagataagtaaattaatttattactacttttaaaacctgttcttccaaatgcagattaaaattcttattttccagatctggaccctgtggagaaacaaaatgattcctcttgtttccctttatagtacagttccactcacaccaattcttatgaggtttggggatacatggtgaagtctaaagttcttacttggggtaattccagatatcaattggctgtctacagataaaaacacacctttttttattattcatatgcttgagcaacccagaaagtacatctggccttcatgaacttcattattggcttcacataatagaggaatatatgtttgtcccttaagttgactcacttccctgtcttagccaagtgactcacagaggacatcttctcataaactttaatattgaaataatttggaataactcaacattttaacctgtcaagtccctaattctttctaatgacaagaacttcatcatcacaacaaaaagcccattccatttttagtcaaccataactgctacaaaattattttttctgcctgcccgtgactctggttccctgagactttcaactactaacttgagtctagcgctccacagtttcactcttttccctatgacagcactctagccatctcaggacacctactgaattctcctaagatttctgtttttcagaataaacatgcttcattcttttaacctaagggaagctttcgccaatgagcccaggaaagagtaagaaactgaatttccctgcaactaggctatttgttcagttggaaaaaaagcaacaagatttggcttttaccttaatgaagcaacagcctccttgggtaatcattaaaaatacttcctggcatttgttttcaaaaaaaatatccctctacctacctgcacatatatatataagtgacatacacattgctcttcactttctcttttaaaatatcttttaaatgggcactaacccatcttcagctcatgtgacttggctgtctacccaagaagctactatcttctgccttatcacatggcttcatttgagccacagctcatttactaaaaattatgctatttcattcttttaagcccacacctgtgtcttcttatttttggaaccctaagatatcaggcaaggaattaaccactaaacttcatccaataaaccttaacctataattaggcttagtaatgtgtctctgctaattacatgcctttaaccatctcagttccatatgctggaaattgttaactactttgcatctttagaaaattggaaaaaatgaaactttcaaatctagacaacttacgaaggacatccacctaattcatcctggtccttagaagaacctaacttacaatcttaatcttattgggagtgcaggggtgaggtgaatattcatcttatctagaaagttacacctatgcatttaaaaaggaaaaacaaggtttcagtcctggcttttttctgatttctgtcccagttttcctagctgtgaaacaaagataataatagctctactttaaccatttcacaggattactataaggcctcaaaggaatctactgacttttcatctttccaaatattgtgagattgaaacttttaattgtatttttactatgcatatcattgaagaagatggaaaaaggcaccatcagaattccatagtcatttactgctctaaaataaaatgcagataagtaaaaaaatgtataagataatacatgaaaaagttcacttgaaagtataccatgtaataaaaacataaggtgcaatgttattaataatggcactttctatgacctcaagtgagacgttctataaatcccctccttttaacaccaaaacattttaattaaatcctcttttttatctccttttccctcatcaccaacaaaaaaaagttccagcataatcttttagccttggacttaattacaaatgccagcaaagatttacatagaatacaatataagtatattctgacatttcataaaacccagccatcctctcagactgacttcattttctttttcatgtttttataaccttttctatatcctcctgaagaaaaacaaaagcgtctaccaatattttagcaactggcaacactatgaatattttagttattgttatctaccttaaaacccttccatgtggtctcatggcttttctttgcaaaaatactaggtatttttttctcaactgtgtcctaaatttttccagatttttagagcccattatagcatttccacaaaagattatagccactggggctgctccatgagtttataatttgaaagttcagttcctgtgtccaggaatacagattccccaaagcgaggacacaaagtgacagactacactgaaaaacaagaaacaaaaatgaagaaaagctgttaaatgttttatagctagatattaagaaacaaaaacatttctaccgccatccgcaccccaatcttagagcatcaagttgcataattttctctaaacagtgtatccaaaccaaccaacagactctatttttatgtactttgctttctgtcaatctcccttttttcactttctcattcactacattcctcttcctgataacaacaacaaatatttactgaatgcttataatgtgcaagaccgtgtgtgctacatgctaagtaaaacatccaagaacaaaatgggccagtccggagtgaaggacagacactaaacaaaaaccacacagatacataatttcaaattgcaatatctgctataaaataaaggatgagaaacaagatccttgcagggagacaaggtttgcattggaaggagcaaggagggtttctctgaagaaatgacatttaaacagggacctgaagaatgaataggaatcactctgatgaagagtggaaacaggtgcattccaggtgagaacacagcattatgtgaatatcttggtgtaaaaaagaatttagagggtccaagaaactgtcactagaccagtacagcagctggatcagaaagaatgatttgggagaaagacaagagctgaggctggcaatagaggggtcagattctgtggggccagggtcttttatgctaagaatatttttgtttgtttaattaaagtataataggaagctaagaaaaagtatttcttggatcccaaagaatggtaggtggggttttccctaccatacaaggaatatggaatttaagcatatattattttaagaagcatgggaatgaaagacacaaaatgcatgagtcattatcactagcatgacgacagggagatataaaactagaaaaggcttcaactatattggtaatattttatttcttataaacacaggtatttataccattctttagacatttttatatgagtgaaattttcataataaaaattgtttaaagaattaatgaatgctaagaattcactgatttatttcccttccctcttctttctcaggctcatatcaaatctttcaattttgagaaattcaagcacatagaatttagagatctcccctcttatacgttttgtttcctgagcctttattcgctagacttttagcatcagatgttaggggttctttaattagcttatcttttgttttagcatacactataatccttacagctttccaacaagtacagagttaatatgaggattaaatgagattaaaaacaaagcatttagcacacagagctcaataaatgttaactatttttattatttcacttacaataatctactcttcccagtcttaaatataggccagaacattagaactaacaaaagctgagtatataggactaaatagtgctctggcattttgaatgcatgtatactgtgtattttcacaaatacacacacacaaacacatgcacacatataatgtagatttccgacactgaatttttagtttttgaaaaagatttttttctgtgctcatttaagcattaaatgacaaaatgctaatttgaattgtttttattcccactcaagatgtaaactgaaagaaaatgtgcatttgtttgtgtggaattgcaatgtaaggcaagtttaatatgtttcctaacttctcctaagtacaacaatagtatattgaaatggcttctgattacatagagtttcaataatattcagtaatgtatggtccacatcatgcttgaaaggttcatttttgtaatatgaagtaatttatgcaaaatctcaatcttatagaattgaatattgacatcaaaatttcttctataacaggaggagcagtctttagtggaagaacattattaaaatcatatcttttcacttaattttctttgtacaaatagcacagagcctctcatttctctttccttgcaattcacaaataccataaaagctgtctttagaaaagtccttattaaacatcatgatgaaataagtactgggaccccaaaaatatcagaacctataacagtttttgttaactagacatctggaaaacacctcactgaatctttacgtgaatattttactttaaattatattttaatacctaagaacccagaacttcctcttgtgaaaaaaacaagagagtttgtcactgaagattcttcagtttatattccttgaggtttggacttagttcgttttagtaatcatttctccatgcccatttccttgttcttaatcacaaatctaatcatgtatttttataaatattcaaaattaaatatatttatctacttatgtaaatactttttagttactgtctaccaatagcatgtatagggatctcattaacaaacagatttagaactttttagatttgttccagcagcttgtaaattcatcttagacttaattgtttaaatatatcaacattctaatcattttaaaaagtggacagaaaagattaattccaagttttcttttacttaccaagctctgccattccaccccgctgccttaacaatattatcagctctttggatactcattcttgctaagtaaaagcatatttcttctctagctggattaataatcaactttctagatagttcatttgtaattctcttctggttaacccttagcattacagcagtctgcccaactcatgctaatcaatttatgaaggtagaaggaacaggggaaatttaatcaggcagatatcaaaaggaaagtaaaaacgaggtacagtttaaattaggcccaaaagaataatcagccttacactaaaaggtataaatctttgttagatattacaaaagcattcaggtgctaaaacacaagatacaagatacatgaagagaaaaacctaacaggcttacagcacaccagtccagtgcataccagcccatgtttattgctttcttatatgcagataaacaaaactcagctctgagcacaagacatacatttttctcttagtaaaaaggtctgactttcaaattccaaatgtctcctctctcaacagttgtagtgacatggtcccttatcctacaataaatgtcatcccaggcttcatggcaattttctgcaaatgcaatctataaacacttgcatcagaataatctgggatgcttgcaaaaaatatagacacctgggccccacttgacaagtcctaaccacccaagtgattcttacataccttaaaagttagagagccactgctctaggatcagcttaagcttacctaagaaggactccaacgcaatcccttagaattcagaataaaagtatgtaccttattgcgagtttgaccttgaccttttgtcttcattccaatagctaagattccaccttgtttttctgtagctgagtgcagtagtccatctaaaaccataaccattccctggccttttagctagttatacatttcatattcctggatgtgaataagcaagtcctattcatcgtaccgggtgtggggcagagtagtaagggtctactaggataggaacagtcttgggagaaagttaacatagcagacacaatgtattagctaaacggttggacaattgacatcaataactatactccattatagaaaaaaaactagaatctgttctttaactccacttgttgtctatgggtcttattgaggtctagctgcctatgcctctaagtaccacttaccctagatttttttttcctttctctgctttatgaaactctttaatatcctgttttatgtatttcttctataaggtcaaaaggcagacatggcagccagtggtttcacaaattgctacaaaaggccatgttcataaccagaattaaggaaaagataaaggctatggaaaaaaaaaaaccataaaaacctaaaggaaaacccttgagaactggaatgactagtagaccaagtaaaataatattttttttaaattgaaattctaatcatttatttttattttcatagaatcttttaagaaaggtcaacaaaaagatgatgattcaaaagatgattatgagagaaggttaaagtgactaaaacaaagaaaagacattactgaactagtagaactcagaaaacagatttttcttggcctctctaccacttcctagatttacgatctagactaaatctcttaacttttctgtgcttcagttcctcatctgtaaaatgaatataataaaccaggtctgtgtgtctcatagggttatttttataattaaacaggatcatgtttattaaaaagctttgaaactataaataccatataaacataagggattactgtagctatataaattgctactgtataaaagattataattaacatccatagataacttaaagcagtaatatttttattgttttatattatttttattttattttattttattttattttaagaaactgggtctcactctattgaccaagttggagtgcagtggcactatcatagctcatttgcaaccttgaacgcctaaactcaagtgatcctctcacctcagcctcctgagtactacattatttttaaaggaaaatataagccatatacagtgaaaaagtaaatggaagtttgtaaaatgtctctcctaaggaaattttaagaacatgaccaatattagttgggggaagactaaggcaaaatcatcccaaagtatagataaataatcagattaacctgagtttgcccagttcatacttaagccttaaggttcttaacagaaggacttccagatgaggaaagggataaggagtgatactggtgacatttctcatccaaaaccatctacctaaagacagagttcagactgacttgaagaagtaaaagcttggggtatttgttacatgacatttgactttatccaacattgccctaagattcaatcaagtgccatgatttgatttaactggctaacatgtacatgttcaaagggagaaaatggaagttttagccagtgcaaaaattggttgatgagagttgcccacgtgaagaaaaaaggattcttaacttaaaaaaagacagtttcagttccattgaaactgaagaatgtcgaatttttaaaaagttccattttttaaagtttcaataaaccattcaataaatattgttgaacatgtttaatggtctaggcattgttcaagacactggcgaatatgaggaacaaaaacagtcaaaaattacctgccatcatagaccttatattccagttggaaagaaagccaatacatttaaaagatatacaaattatatagtatgttcaatattgaaaaagtttctggaaacaaatagaacagcattagagagaacaggaatgtttagcaggttgcaattttaaataggatgttcaaggtagatctcactaagaagacatttaagcaaaaacttgaaggaggtgatgaagtttggtgagatccttatactacaatcatgggagttatttttcacccatgttaacatttttaccactttaataataaacaagatattcttataaatatacttttgtactataatagcgaaaagctataagtcactgatgtaatggtaaaacaaattgtggtacatccatatgatggtatatgatgtagtgattaaaaatgttctccaagactattaacataaaaaaatcaataaagtgagtttttagatacaaaaatgtatacataatatgatccaatcttgcagaaaatttttttcatttgctcaacaactattttttgagtaccttctatgagccaggcactattctgggccccagagagagggcagtaaacaagctagacatgttctttcttctcatacatacgtagataaaagacttgtatgaaatataccagaatattactaggaagtaaatttcattatgaaataataaggtaaaattataagttattttatttcctcctttatgattaaacatagtcccaaatttctaaatactttctgaatggtgccaaaaacaaaccatggcctttatattgatctaaacattatagtccatatttgttttgtgatatctgtgtttgcataaagcacaaatttgcagtcttacaatattctgccaaatgtgtattgcatttttcaattatataccaatttttatgtctcataacacctaatgaaattgaataacattggatccctttctacaaatacaaaaactaggaaaaagaacagttaactaacttactacactagaaatagtgtttaaattgtaaattataacaacgcatatgaaagtatctcacacagtgcctggaccaagaaaggtttgcagattctggatcctatgctagtaccttcccagttctgctggagtttgttgttgttgctgctgtttgttgtttgtttttgacagggaaaaaaatctccatttatttaaaatggagcgttaatagttaccaaaaaaaatcttatgtgaatcccagaccctaccacgactaccaggtgttagctttattccatctctcctcaatcactaaaatgaccagtaaacaagttagacatgtttttttataatgcttttccagtcttcttttgatttcagtatttatatttaaaccatgtagcaaatggcagtggtctacctctaattagtcaagttgtcttgggcaagtcatttcaactttccagtctcgctttttaaatttttcaaatataagatttggactaggagaactcaaaagtcattaagctctaaagtttcattatattactttaagtctatgaggtatctataataaatcaaaggaacacggcttctcaaaagaataaaggatacagcaatagggtggttggctagaacaagaaaacaaagaccaaggattaaaagagaatttgaaaatctccccaaccccctggaccaagtccagcttcagtcacataaaggttgtttgggactatagagaagaataaatatgaaggtttctcaaatcatcaagagatgatgtttttgcttaaaaaagaaaaagtacacttgttcctatatactctctagttcttaaagcatacatacacacatcaccaccaacaacaaccctaaatgttttaatattgatatggaaggaaaatacaagtcactcattttgctgaaataaagtattttaaacccagaaagggtgatttggttttgagggaaaacaaaacaaaaacaaaacaaaaaaaacactgtattcactctttttctattgcctcctctgtatacaaacccacagtagctcttaaatttgtgacattttcttatgtacatggagaaaaatttgtgtcactattgcagcaacatctaaacagtttcctgtaaactttcagtgatggaactcatagaatttatgataaaatcccgtagagtggtgaaacaaatttctttcatatttatcattcattttattcagtgtgcatttgaaggaaaaccttttaagaacaccaataacgtgagaaagctaaaacaactaaatttattgttaagtatcacatcattggtccttctgggagttcaggaagaaggcttaaatcacatttcctaacacattagagagcttcccagagatttgatggcccacagaagcaaaccacccaaagcacactggaatctcagagatggtgacaaagaaatatcgctttgtttaatgaaagcagactgaagttaccctttcattttttttaacaaaatacaaactctcttaccccatttttcttctttccttcctccacccactcctgtttcacctgactaaactgtaggtatttgttccatcacctgacttaggggctggctagaaatattaggaaaaaaaacaatctactattgttacatgagacaacaacctttcatgtccttgaagctcaccatgacctttcatctttcctatccccaatggtctctcctaacaactaaaactacactcagttgggctgaattccagattgtcataaaaagaaccctgtcctttcaaaacaaaaccaatttttacaccaaggtgggggagaaacacaagtccattgttccctcacagatggaagttggagttactaaggcaactgctctaatcctcctttttaccacctttttcacatcactggcctatcaagtatgctaccttttaactcataagctcaaaagctggtagtctaactggctgccctaattagctacgattttcacactacagacaacatgatgagctaatcgaaatttgcaaaataatgacgtacctccagcaaatattcctcctcctgaggcccagtcttagaataacaataatgagaccattattagagaagggcattaaaatgctgcactgctgctaaacagagaacttaattgttctggtcttgtccattgaatcaacaacctattgttgtggacttgaaaaataaaggactggagaatgggtgccatgatgattggtctgtgcggccataccggcactctgtagaattgttttcttttgaaactcttgatggactagtagttttgtttaaaagtaacataaaaggcgattgtctggataaaaagtcctatttattgaaatccttagaagcagttgcatggatttgttcgtgacccctgagataaaaacatagtgaccataataacaccatttgtagagagccctgttaccactgcctacagtaacataagataagagacagtcttttctaactacagtaggaaggaaggaagtacttctgagcagaaaacaagaatgataaaaggtcaaatactggataaagctcattaatcactgaaagggagactttaaaaaataatgctaatttaagaattctgtacaattgctaaagattcaagcacatgtaaaaaggcacacagcttgttttttcctttcccacttttgaacttctttggttaaaaaaaaaagaattaaaataaaattattattaaataactaaagcaagatgtctcaggataacctggagaacaagaaacccaaaggtttctagataattattcttatggtcatccccagtctatattgagaataacaaaatactgaagttaaaggttaactagtgtaggattcttagctgtagaaaagcactgtttacacactgtaaaagtgtcttccatatggggccacagtacatgttttctgtaaagtcaaaccaagattttagtgttgaattgtggggaagggacgtacttttgctgttagtgggtatttggggtgagggtctgtttgttttttaccaagtgaaatctgcattatataaaaatgtattaaattgtaaataagacctcttgcttcattcaaactgtgctttgcttcatttatcttcatcttgttaggctaaattaattaacaatctcactgttgcacactttctcttttcattacatcaaataatggccggtatattaagaaagccctcaccacgggaattctgcaacactactgctaagaagagtttctgtgtatcaatgtaacaatattcatttcataagcatttattaaatatacttttattgttaacaaccaattaagcacctaaattcttaacatgttatcaatagaaagccattttttaaaaaagcaaaactaaactaaaagttgcaagatactttaaaaaggaaaaataaatcacattgtatgcccacaaccaggtttcaccatcaactttacctaaaataagaagaaacacatgaaaatttgacaggtatgttttcagagatacaagacaatattgcataaaaggtttaaaagacacaccccaagccgttctgctccttgctgtggaatgtttaatgtgataaatgggatgattagaatttcattggtaaatcccgttattttaaatctgtaagaatgaaatgttttaaactcttttgtaagttttcttttcaacctgaaactctgtggcatctagaattatgcaaatggacaaaacactaaagctctttttaatcttttccttgatcaaccagtgcttctttctccaatcacagctttgtgcgtgatatctttctgctagcatttcttatttaattaaaacagacactgacagaaggacacggattagtactgtaatgatgcatttacttagattaatcggaggctccttttagagtaatggcttaaacaaagaacaaaaggaaattgttatgaaacagccttttatcccaggcaaaggtcgcattatgaggtttttaattttgtcagcttctgttatactctgccttgctagtggaacatgagaagtgcttttacccccaataaagccagttattataaaaacagccattaaagctgcaaattaaaatgtctgatttttaaaacaggttacttagctttcagaatatcctaattagcatgttgtacattgtggtgaggaaaagaagactaaatgctaatgacctaccgccaggtgaccacactgctgtgcacaataataaggacctttccaagtaatatgatgaattaaccaagtacaggtcccccatctaacaccccttctccgaatacagcttcagatgaatggagggacgtgactgtttggatgtgttcagtaaggccctacttctgtccagaacactctcagccagctactttttatataaccactaaaaggcagaattctattacaaaagagagtaaatgaaatagcaatactatatacagtctgaagttagaaaaggcaacagtcatttgactgcaaagcacaatgaattaaagaaccatgccccaacaaaaccaactctttgcctcttttcatccaaccttccccatcctatccctctcccctctgcctctttaataagttgagcttgcagagtataaatggagttaaggtttgaaagctcagtctttgttcatagcactgatttttacaccatgttgtctttaaccagctcaaacgtaaatcgagtttcctttttctaaatgttgtttttgccttctgtttactgactccacccactgctacttctccttagtcaaaattgctctcgacaaagggtatattgtcctttgcatttcctactgtatgaacttacctcaattacttgcctacttgtaggtattttctgctctatctttctttatggactaaatcgttctgtgccccataaggctactactatactttaggttaatatatggactagatagaaaatatctctagaattccgcacagaggaaacataatccactttaagtctcacacaaatactcctgagtagcttgctctagaaatttcttgaaaccaacaggaaatattgtcattggaacaagaaatcactgaggatcatcagtgccatctgtcctgtggacttgtttgaaaaggaggattatttgaggttgtatcaactatatacagccacaagaatgctacaggtttaaccaccccaaaacttagtggcttaaaacaataagcatgtatttagcttatgcatctgtaggtcagctggacatttctctggttttagttgagttcactaacatatcttgtggttggccttggctgggacaactggtataattcaactctgctccatatgtctcatcctccaacaggctagtccaggattgttcttctatagtgacagaaaacagcaagagtgtgaacagaaatgtacaagtacttttacaagcctctacctgtgtcacataagctaacatcccattggccaacgtaagctaaatgactgatctcagagtctagtcgtgaggacaaatgccctatcaatattggaagggcactgaaaagttttatggcaaaggtcataaatagaaggaaggataaagaagaactgggttctttaaagtattcagtcttagcaaagaggtcaaggtcatttgatgactcccaaagttcatcagcagaagcttctgttttgttccattttaactaatgctgtctacatagccactcaaaattgatgtcattttattttaataagtgagaaaaattcttaaaaagataattaacaaccccatcacaccttatctccattgacttccaatttaaaaattacagctattaagctgatcctaaaatgtgacctatacaagttcacatttttgtgtactgaattattgtgaatcagttataccttaataaggtttcaaaactacaaacttttttgtctcagatgcttcccttccactgacagaagcagctaagtttgaggagctatctaatggctactagactcagaattttgttcattactatatcttagaaagtacagacagttttattccacagaataccagaaaacagtatttcacacccctttacaacagcagatatagccacaatagcagtgtttaaaactaaaaattcttttgaagtccaagccctatcacatctctatgcttcctccaagagctttgtctgcgaaaaacatacaaagaaaattggtctgaggacactacatgagaaagtgccctagaataagattattaagaagctaattttaagctttgcaaatattctgtttctacaaaagatgaatgaggaaagtatccacgatgattgcatcagtttcccaaagttaatctaacagagtccctacatgtagctttagggatatatctcaagccagttaccagtctttccactcacagacacacatccagcaggaataggagtgattaccgggcagaattcctaacccttgtggcaagggaaatactatcctatagcaccactcaacaattatccctctgagcaattaaaataaccagtgaagtgggtctccaaaaggagccttcacccattccttcatttgagccagccctgacaatgaggttgccaaagctagcactaacacccgaggaacaagaaataaaggccagcaaagctcaatcttgcatccaaagatattaaaaaggaaactaaatgacatggagaagacattcttaagaattacctaactaatacagaaaggaaaaaaataaataacataataaaatcatttttattcccttttcattttttccacattcctttacaacttattttaataataattttgttttaaagtaaagccctgagtgatggtttgccttttataaataagaataacaggaaagaatgcaatttgtcctatttttctagtgttttgatcaaccaactcctctcacctggtctttagcaagtatcaattattacagcagtgattcaaggtcatggaaaagagcaaagctaataggtccatagaaaaatcaaggcttgtgccctcgttaatactgcattctaaacaaacactaagtccatgttcagagagctgtactaactcttctgaaaggaagcagcttacgttcaactcaaaatttcttttaaaactctctttgctttgacagagaggcaaagagaaacaaaagtgcttgcatatcagaaaaggaaaggaccataaagaacaaagacggaaaaggaaagctcgaactccttaagaacattgtctctacatatccattcacctgattctatcatttcacacatatatatttcacatgcatacatatatctcatctggtacatagtatgtgcttaaaagctgtgttgattaaaattatcatacaattagaagaacagacaaggacagaaaaaagtaagcatactctcttaaattacatcaccagtcacatcagatatttaggaagccccaagttaggagtttctaacatttgttttaaactattttttacaggatgaaatgagatgaaacatgggtcaaattacatgtgaagccacacctacctccgcagattttttttttttttccagagtgatagggtctcactatgttgcacaggctggccttgaactcctgtgctcaaggagtcttcctgcctcaggctccctagcagttgagactacaggcacacaccacctcccagcctgatgttttatagagataaaaatatgactaaaactaaccccaaggaaagactcacaagaagaatgatgtcataaatggctcaatgtaaccaatggggtaattgtgggacctgaaggagaagttctacccttttgcctttataaaggacatgtggtacataaacagactaaagtatttagacctcagatcaccttcaactttggtgcaagaggctttttctctgttcatttaacaccttctctgatgatcaatatcttccctaaccaatgccatcaacctgctatcttctgaattccaatggattaaaccataggcctgccaaaaagtagtgaaagataatcaccaaaataatttcattgctatgacagagccttatggcgacaacctccattctttaccaacattttctctatccctaactttcctcttgcagtcccctaacccccctccaaaaaaaaaaaaaacaggcagaggattgggggaaaacagctatgttgggtttatgtttcaaaattctttaaagataaaaatatttttcctcccagttaacagctttaacataaattgattgcaaatgcctctaggagaggtaatatcatgagttccttccacactaagatatatatgactctgaatgcattttataaggctagaatatctatccttgattccaaaataaaatagacacactagaagaagagaaaatcactgactaatcatgaacacagttacaaatatcctttaaattttaactaattctatagtgtaaatgaaaatccactgagaacaaataagttttgtcacggttatcctaaatggttcagaaaatctaccaataataccatattcacagattaaagaagaataactctataagcatcccaacagatgcaatggatagaagacaaaacctaccaaaaactatatagttattggtaaaatttaggatgcattgccatcacagacagaaacaatgtctttcctcggtttaaaaaaaaaagcttcaggctaattttcaatagaataactcaaggccaagaggaagactatctaaaataaggcccaaatatatagaaaaccaaaaaccacatgttctcccttatatgtggaatctaaaacaactgaactcaatagaagcggagagcagtaggtggttaccagaggttgggtggggatggggaggaatagggagatgttggttaaagggtacaaagttgcaattaggcaggaggaacacatggtaagtatttaaggtgatggatatgttagtttgattctaccattccacatgtatacatttcacatgcatacatatatcatatcccagtgtatcccataaatacatataattataatttacccaaaaactaaataaagaaattttaaaagtttctaaatcttaaatgagtttttaaaaataaaataataaaataaagtaatgtccaaatagcagttctgacccaaaagacataagacacaccagggcttccctaagtgtttgtgtaggtcatgacaggctctttgtggtgggaaatatttattatttaacattaagtaagaaacaaagaacacgcaatgacatctatgatctaattgcagttacattaaattcgtttttaaaagatatgagcaaggggccaggcatgatggctcacgcctataacaccagcactttgggagaccaaggtgggaagattgcttgagcccaggagttcgacactagcctgtgtaatgaagtgaaacctcatctctacaaaaaacaaacaaaattagccaggcatggtggtgtgcgcctctaatcccagctacttgagggagctgagattggagaatcacttgggcctgggaggtcgagactgcagtgagtcatgatcatgccactgcactctagcctgggcaacagagcaagaaccggtctccaaaaaaaaaaaaaaaaaaaagatatgaacaagtatgaacaaggactggaaataagcaggtaaaaatgaaaacagatgatatactgtggaagtgtatgagaggttttatcttttttcttattgttttaacataacttttaaccaaaaataataataagggtgcatatgactactatgtgatactatcctatgaacaacttagggtaggggagatagtgagtgactgaaaaaaaaaaaaagaaaaagaaaaatcacacatagaagggttaaaggaacaggaaaggcgtagtgtcagagaaggctcttcctaggaggaattttatccattttaaattgtatttggtcttggttgcaaatttggggtcatctgaagaaaggggaaattctacataatgactgatagtaaaactgtaaaatctactacctctgagaaactccacctgtataactaagtgtgcatgctattccaaatgtgctgttgtctgcgaggactttcaaaggttaattggctttttcagttttggcttgattttaaaattgttctaatgaggcccttactctcataaactagttagcaccccaatcttttcctaatgaaagtatcaacacccaagggacttaaatctgaggctcttataaatgtgagacatatctataagggctagggaaaaaactgccaacttaagaccttggcacttaaggtttgccaggtaaaaaagaccaaattttattgagaatacacatcttttaatttcatggattaaaaaaaacaggatattattttaatgttgggatttttaagtacatttactacaaaatggtccagcctgtgcttaagagagatgattaaactatcaacctagtctttacatgcatatttcaatataaaaacacaaacaaaatgcagacctcctaaaagagcaagaaatataaattaaaaacattacttctttaacagtgacttaccaaagtcaagcagaatttgcatagctatatttggagaataaattttctttcaaatccagattatgttttctaggtgaatgcaaaatttgtactacaatattcatttttgttttgttttctaaactagtgagagctttaatttgaagcaaatctattaacaattatacattaatgaaaaggattaacatatgaaaatgtcacaagcagagaatatttcttcagacataagcagataaagtactctgtccaattcctgttgaacttgtgtatctaataaaagtatcaaattgctataaataagtgaatatcaaaaatataagcaaatttcaacttctttcatttatgaaaaaggaaaactacacacagaaagctagatatagaaattctataaatttattctattttcaaaataatataaactaaaagtctggattttatctatttatatcatctcatttgcattttattctttgacaatgctaataacattatttcagctaaaactatatttgtttaaactgtaacacatttcatcataaaacccatactcctttatgctcatgaaaagtaaactagaataaatcgcaaatattaggtgagacaatggacattaaaatatttctccaaatcagatatatccatatatgcatccaccataacagttgtgcagttatgcaactttggctgtatgcattacaacactcagttgggtaagtgataaaaaaccaactcaaagtagctttttttattaaaaaaataatttgtcggttgggcactatggcaggcacctgcagtcccagctactcaggaggctaaggcaggagggtcacttaagcctggatgacttgagatcagcctgggcaatactatgagacccccatctctaacaaataaaaaagtaaaccaacaggcaaacaaaaaataatttattggttcacttaattgaaaagtcctgccttctaacacacctggactcagtacttaaatggtataattaggaaattggtttttctccttctctctctcaggcaggctctcccctttcagtggcaaagatgactatcagaagctcaaggttagaaacctcagtagaaagacagtgtttccttcccagtaattccaggaaatatcccaggattgagtctcactggcctggcttggatagcatgtttatttctgaaccaatcactgttgccaggagtatgaaatgcccactccctatgacgtgggaggaaaaaggcagttccacctcaaccacaggtaccaaaagtgaaagaagggttgttccccaaaagaaaaccagaacaaatgctgcatagtgaaaacagtaaacagcaaaagagtttcttttgacagtaattattacagtgaggtaacttcagaggaaaaatataaaaacaattgcaaacttcatttaatagcagttgcacagcaaaaacttctttgcattgtttctagtagtcccaaaagggggacaaaaaacacgaatctagcaattcttaagacaaatgagaataaaagtattcttcattcgataacttttgtcccttctcttacttcagagacagctaccccaagtaatcattccatcatcccctttaagtctaaattcttagaactcttgcaaagatttacagagccctagctacccatctctaaaaatttattttgatggatcctcaagtaatataaaaactgcttaaaggccactataaacatgaatgagggaatgaggatcccatataacttaattcatttagtttaatttgtatctgaaaagacttctacttttttttttttttttttttttttttagatggagtttcactcttgtcgcccaggctggagtgcagtggcgtgatctcggctcactgcaacctctgcatcctgggttcaagcgattctccagcctcagcctcccaagtagctgggattacaggcacctgccaccatgtccagcaaatttttgtatttttagtggagacggggtttcaccatgttctccaggctggtctcaaactcctgacctcaggtgatccgcccacctcagcctccaaagtgatgggattacaggcatgagccaccgcgcccggccgagttctacacttttaaatgcgtataccacaaaagtctaacattttttggccattaatatcttgggttgagtatgctcacccaattctttcctgaaaggagggttttatatgagggactggaaggagaacataaatgcaaaagaagcctggggaaactggaaagcgattaaaggaaagaatggctgaggtaccaaaaacaatattcatttatgtcaaattcattcacacattcattttatgcatacatttagagcactgacaatgagcaaactattgtgctagagatgatacaaagaaacatgtcatagtccccactcctccaaaatcataactggcagtgggagagaagaagcatgagcagtgataatgagagtgatgtgccaattccttctttttgttttcccccaccaaaagctccagattttgttcaggtcgcaggataaataatacacttcatgttcttcagaaacgtttcatttaactcatctgcaaattcaagaaactactttttacctaactctcaggataacatgaaaatagtaaaagctggcagcacatataagaaaagctaaatgtaagaaaagcaatgcaaatttggtaaattatgaaaagaattgggaatatggaaatttgcagaatttttaattaattccctcagtaattataaactgagtgcctactgaataatgggcattatatatggtcatgtagtaagatggattatacttaatacccctgcaagtttaaaaaaaaacacaaaactttccatcagaaactagtattaataaaaggactgttcacaaaaattactaaaaagataaattgtgacaagaacaaaaagagagagacaaaatgctatgggagttcagatcacagaggcgagatcacagaagactacaagtagctaggccttgaaagatggatgaaattcctacaagtaaatatgtttaacagaagtattccaggtacaagaaactacatgaaatatatcaagaaaatacaaactgcttctatgtcagtcagttccaaaatatctacagaattttggatgagaggataatataaatataagctattttgtaatattctatattttaatgcattgttattcaatattagaagattctgagagctataaataatgtatgctagaatactttgctagtcattatattcacaatgtatgaataatggaactcttcaaatacatctgtattgggcattatatgcagaaggtacccaagatacatgttcttttttcaatatttttattttgcaaatgagtaagaaaatatgaagtaagcctcccacatgtaatgggaagtacgtttgaatgtttgacagcctagacatgtaaattacctgcttaatttggcatgtaaataaaaatatctaggcccctacaaagacttttgttaccaaaaataaaatataactatttgtttagtgaaataagccaggcacagaaagataaatactacatattctcattcttatatggatgcttaaaaaaaaaaagctgatttcatagcagtagagtagaatagtaactactagaggataggaaaggtaacagggagaaaaacagggagaagttggttaaaagatacaaaattacagctagataggaggaatttctatagaatactacataggagaatctagttttctacagcattgaaggtgactatagttaacaatttactgagtattttcaagtagctagaagacagcatgattttgaatgttctcaaaacaaaaatgataaatatttgaggtgatggatatgctaattaccctgatttgatcattacatattgtataccgatattgaaatatcactctgtaccccataaatatgtacaattattatgtcttaattaaaaattatatgcacaaagaacaccatggaatacacaggcagaataaatgatcaatcacgagggatactagcaaacttctagattatctggcaatctaaatggcatgtcattgaggaaaataacagtaaagagaatcttgaagaaaaaaatgcctcctgagtgtatcgattcctagattaaaagagtaaagttatgaggaacactggtgggatttgggattctagatagtcctttgattttaaatattcagcataaagtttagcacacatgacttcacaagggattggtcccaatatgtagctctttaaagagtatacacttactctgttgcctacctctccgtacaatgaacatgatcatggtgctcacctcgtaaggcattagcaccacagtaggctaatagagcactagagacagtctgcttgtcacatgtaccatggtcagctggaaaaatacaccttcacatttagacccacatgattcacaatcaaactttaacagaaagaaaagcatgttcagaaaaagacttttgccaagctccctgtagactgaaatgccaatttttcctactggtgagcatcatgcttccagcattattctttagcaaggaaaatataaaacaacagataggcacagaattttccaagaagtctctagtctctctggaactataaaaattatttattctgaattgtaggcagtcttccaagtatgacattttagaggattccactaccttctaaaataccagatttggaaaactgaatactacctgacaattcttggaaacaaataatggctaatttgtaccagctaaaaagtaaagtctgaaaatctgccccaaattatttaaattaaggagtcttcatttcaacaggttgccagctaatctcagaatttggactttaagcatccacgacactaaatcattctcagcagcatttttcaagaactttatattcttctcttcttaacatttcctatactttcacaaattcactcaattattcattcaacaaatatttattaggtgcttactatctgctaggaactgtaattgacaagaaaccagaggtatttttccactttggggactatgaaatcttgacagaatatcacaatagtgtcccataaagccactaccaaatactttaaatgtcaactagtaattggatgggcaagatggaagacatggagacagaagtattccatagaacaataccttccttctacctttcacactgaagcgtgaaatggagtcagaactccccatgtaaatttgatgtcctttcatactggacgaatttagctacactaaccagccagccttggtgagaaagtggaagtattgtcctgcttgaagagaggaaatgagttgcttttgttgaggaagaactaagcaataatacacagcacaggaaaatccaaatgtgctttttttaaaaattcatatattggcactttgaggcttaccatgagtatctaattaacaagaatgctaatggcaacacatttactttgggttccatccagactgtaactgcattgcctcctaaccatccatacccctggcccatcctatcaatggacagcatattgtgttttctctttgaaaggctcagacacagggccagaatgccactaattcagcaaaaattcacgactgtgattggggtaataaggtgctaaagaagtcagaaagatccttggcagggcaggcatttacaacccctcagccagttcaggcttctgcctgacagatgatgccatagtcttctggatttaggaggattctcttttccaagaggaccaacatccatctaaaaatagacagagatgcaataggataagaaccagaatgcggcagtgggaagtaagaaaaggaaaatattttactgcaatattccagcaacttaatttggaaaaaaaaatcagtttgagaataggcttctaattctcatacctgaatatacatcttattttttaaaagttgaatgccccaactatttttataaaacaaatatacatataaccatggaacacaattgcttaaaccttatgcagatattggtgcaaaacaattactatttgaatttgttttcaatttcttcatgcaaagtgatgcctagttttaactctttgtttatataattttaaagtgctttgtctactataaattatttctctgagttcattctgtaaccaacactctctcactgggtaagccattttgaaatatttaaacaaacgctaatattcctgatgctacagcttttaaaaaatatgatgaaattatttaaaaatgtacgtttcctcgactactcatctaggtgggtccttgtacatcattctatgcattatgaatggtaagaatctttcagttgtatattataatcacagacatttaaaaatgtgttttgccttcaccttacagtactatatcctgataaaactactgaaattgcatacaatgcaggaatcatggcaattcaaacatagagaccttgatctaaagtactcctgaagtacaaggtattttgaaattcgtaaaataactaattttttaaaagtgatatggtaatcatcattagttcattttcctctgctttctatcactataaaaaggaaaacagcctaggatccaaatgcattgcaagagattggagaatttaagatcaaggattttttatcctgagaacatgggactggtactcagacaatggtagtactacagggaactgtcaacttgaaacaataccattgaatgtttctactgtcaaggcagaatataacaattagccttaaaaaaagtgcatctggaataagagaaatgggaagaagtaacaaatgtctagctcgaggccgacttcaatctggcagagttccccacatattcctaacagcattcaatggaccagctatccttagctctctcatctattactgtgggaaaaaacagtggtagacaaaaagttgggggcaacaacagggagtgggaggggggccagggagagggagggaacctgattggcaggcttcaaacagttaagcatgggcacctttaactaatatggaaagttaaacagaaattttttacaagctggcacccgttcacataatgagatgcattgtcagtctcactaagcgaaatatttgtgttgccatgcagctaaacaaatgccttttttcactttcacttaagacagcctcccactcctatttctctgaacagtagaggcagtcctagctgggtaacatgtgtagtctgggcagcatgtttcctgccgcctcacaaaaagagtatttatattaacattccagattcattgggaattatggaaactccatgcattaaagtcaatgcaaaatttctgctattttaatatcttcacttatcaatcaatgcaacttggcacagatttaagagtgtggcaacatttttttcatgccatttgcacattactattcataatgctacaacgatctcctgtataaaatatgatgaattcacaagtatgattatcaaatttatggtgtgtgctcactacaccacacattatggttttgtagcttctttgccctaaagtaacaaagatttgcatagagtttaaatgagtatggtctatacaaactatagttaaaatattattacagttatatgcttttccatataaactagtaaaaaaatcatatttctttctcctttagggcagtattttattacaattaaatgaaaagcttagctctgctatttctttgaaaacaaaatcaagaccaaaagagatacagttcaaggattagacctgaaaaccatagtgagaaattttaaaaataaaaaaaaatgcaaaatatcttattttctctaaaataaaaacattgtttttgcaatttcttacagagaaacaccctcccaaatacctgacttctagataataatgatgaaaaatacatgacatctagattacaatgacatatagataataatgatgaataatatagccggatttttcctatccataaactgttactcggggcaacctgatattttaaacctcattttcagagtccctcccatacttactattagcaccatggcaatagttcatctccagctgcctaactcaacataaggctccctgtacctcataagtggttttccacaggcttcaaagtcagagagtattccaaacagcaactctctttgactttaagaacatccctacatgacgggggaaaaggtgacagaatggatttttaaattttttcttagatttctcaaagtgaatcaaactcaaaagtaattctacaattctgtttttaacattaattggaaaatatattctatcttgaataatgttcaagtaattgataattgtcacaaatgtaattgttctcttcttactctgacgtttttaagctcttgctccagtgaaaaattaagccatgcttaaaataaacaagacaaaagaaaagtatccagggtaaatataaattgagagaaaggtcaaaaaaatgactaagactgatgtgctacaattaataagttttttaaagggaaggtacatttattcttcttgtctaattctggattgcatttgctttccatgagtatttgagatgaatatttgaagaaaacattgtaaacccttccaacttgagacaacagcagccgactacattttccaaagggaggtctaaaataagtaaaaatgtgtattcctttccattctcataaaatttcaacattgaagctgacatttaaagatgactagtttctgtggcaaagggatatgttcaatacaactcccccaaatacatctgggcagagaactttctgatctaacgttaacctcctctagggaaagactactagagagagataaaaagtaggattgttattctagaagatttctcacaaactagttttttaaaacgtatttttttcttcagtgttaggactccccatatttatataactaagttgggtgaaaacttaatttttgtattgtattcttcaacctcttttgaatatgagaaaagtctattgcttattaagatgtaactcatcctttgggccagtcactgcttagaatacaccattgcttgatttatcccacatttacatcggggttatttatcaaagatatccaagagtggaagagacaaaacagaccaaggacattatgtctttcaagctcagcagcatttagcagattcctgggcctccaaggcctaacatttagctaagacttcttaaacaatcaggtaaaaagggccaaactagttagcagatgtcttattcagataacgaagagaatactttagtgacaatgtgagaaaaaaaatggcaaaattgatacaaaccctttgaaccatgtttccctttttcctctcagaactcaacctggagtctaacagggacagtatccttattctcgagcaaatatgaagacaattgtacatatttataagtacaccaaaatacaccaaaataaaatacttagaagaaatcagcacatcattgttaagcaagataacatatctgaactctcaaaagattgaagacaaacacaatgactatatattgatatttgagtctcatagaaaaaatgaaataaaaagattttacagtattgctggacaatttatccttgatttcatttctaacttaatgttaacatctagtaagtccgattttaatgcataaaatatagaaaatgtgcaaataagaaatattaatattctagactgttctatttcatacccctgaagaggtaaaattattgtcgtgtgaacaaagccaacttcagcatttggtaaagtcatttcagttcctgtatgtaaccctttataatgcccattatctcaattaaacatcttcagaaatagccgtagtaatgatgaagagaattcaatgatattgtacaaaagaaaacaagctgcactatctttgacttgatttgttttgacttcaattaggaactatgactgttcttgttcttttcagagattgagtttaaagaaagaatagtttttagttatcttaggtcacatttcaagtaaaaactgtgaatgaaggaactttacaaaggcactgttaagtattggagtgaaagcactgtaagaatcagtttactgttagagtcagtttagtcattgcccaacttactttccaaccatctgcattaaatatgcttcattaaaacagaaccatttggaaaataagctagcaattaacacagcttttgcacatgcctctaacacaatagatttcaaacttttggtgaaactgactcaactacttccatgctgctgctatgtaggacttggcagcagtccctaggcgtgcttcatccataccatgtcatttcaagatactgctgcattactgaaataaggacatacgaaaaaaataaaatattttatcactttccttgcagttggtatgagctattaaaataagcctgggtacattgaaatagtctttcagatggcaactaatactacatgacaggaaaaaaagacatccacttttatataagtcacactaatggcctttacatttgacagtttatgtctcttaacaatggatataagctgctataattatattttattaacatgcagaactattttagacctcaggaactttagtaaaatgatctgtgcaaaggattgacataaaatagtttcattattcaccatcaacaaacctcagactacagataggacaccatgtcaggtactactgaagcaaagaataagacacagttctggtcctcagtggccttatagtctacctggagagattaaatatatgggaagtgataagggccttttgagaataatgggaataaaaacattttttaagagttaattcgcactcccttcacctctatccaaatggttgtgtaccattatacactttattcactgcacaagggtgcccagctgaaggagcaagtaggctgcaaacctagccagcactgctcactaaatcatgcaccctgcacagggctgtaaacatctaaggaaaaggcacctccaaggaaaaattttgccaactcacaaagccatgctaatagaggaagtgacatctactcaaaaaacctttattttttttctaatttatgtattcatagtatgtaccattttctgctgctacgactctagtccaagccatcatcatctctcatataaacacctttatattagtctcctaactggtgtttctgcttcaacaactgctcttctatagtctattcttctaatatcagattatttttaaatgtaaattatatcagtttgcttctccaatcctccagtggcttcctatctcacttagagaaaacccagagtcttcatcattcttttgaggaactacctaacctggctaccagctatctttctaatgttatctccaaattcccttttattcacccatttgactctcatcactctattggtgccagcttttctttgaacagacaagctcctcactcttcaaggcctttctatacatttttccctttgcctgggagctcttcttccagtactttgcatgacctgctctctcactttgttcaggtgtctcttcaaatctttctgtatcagagaagccttctctgacaaccctataaaaaaattgtaccgccatcactctcaataaatatttattgaataaatggattaataaatgcaaatgatgagaaaataagatccttgtgacgttatttttgtctgttttgtttcacttcaatattcctaccatctagaatagtgctttatgtgtaacaaatactgaataaacatctgatgaacaaatgagtgaccactgcaataatacataaagaaaaaggagtcaacacctttctaaagtctcaagtctggtgactaactgcttgcatccctgtcaaaaataaaaaaggctgaaaaggagattgacttaggggaaagaaatggtaaacttgctgaatttgaagtgacaatgagacatccaggtaaaaatatagagttaaacaggcagaactaaggctgaggacagacctggaaaagtagacatgagatccatccatgtagagttaaaaggcaatagaataaatcagacctcctagaaagtacagagtgaaaacagcatagaaagaactaaacttagagatgcacacatttgttttataagcagaaaaaagtagattaatctaaaaaggctaaaaaggaacatttatgtgctaaaaacttgttgaatacctactatgtgttaagtgctgtgatgagccattttagtcaaccgtattaattactacagaaagtgagaagagtgaggcctgagaaaaagacattaaatatggaattaggcaatctctagtaatctggaaggcagcacattcaatacagttacccagaatgaaatagaagccagatgccaatagacagaggaataaggagatacagatagaaaataaagactattctttcaagaggtttgacggtaaaaggaagaaggaaataaggatatttcaagggttaccaaagtcgaggaaaactattttaagaagaaatctgaattatttgtgcacataggttgtaataatagcatcttgcattaaatggtgttttctagcttacaaagtggattcatatacactattgtaactgactctctacaaacttgcaaggttagcaagacaaatggtattttaagataacaaactgagactcaaaaaaggcaagtaactcgttctacttcccaaagccagaaagtggcaaaatagaaaatggatcctgaatctccaacaccatgcaaactaagagagggaatcctctgtagagggaatggaagtaaaaaggcacaagtggtgatgtcaccttctgaacagagatggaacatttcttcctctgagaaaaaagagaaaagatagctttaagtggcaaaagaacatgaagcaatgtgaggtgaagaaacagaaaagactatggatggaattcctagatgtgagatacacaaagttccatttcaaagagaaatatctatagataggcataaagttacacacctgaactaccaactctgaaccagtaactcaagagatattttgtgtgtcccacaagccatatggctctggggacaaattatctgaaagtgcccaataagaaaaatatttgaggaaggggagttggtgagtgaatgaattaaaggacatcagaaagatacattgactgttctccttcccaggaaacaaagtggctaagtcaaaacaacgggcagctgtgggatagcaaagaaaaaaaacttccaggcccaggttctagtgaaagctactatggaagttagccactcaactttagaaccagaggcttcttttcctcctcccttcttatcttttctagtttatagcaaatttatattgagccacttattctttctgaatgctagttcccctttagcatttctttttcttcattccctttggactggcccaatgctttggccccttatcaaagcattttctaagaaacagtctgacagctctaatttgcatctggttatgcaagatgtggttaagaacatggactctggaggtaaatacaccttgattccaattcattctctcatttattcattcagcaaatatttagtgaacatctaacatgtgctaggcactgttctagttgctgaggatacagcttcaaacaaaataaggtctctgcaaggatgccttctcttaccactcctattcagcgtagtattggaagtcctggccagggcaatcaggcaagaaaaagaaatcaaggtcatccaaataggaagagaggaagtcaaactatccctgtttacagacaacatgatcctacatctagaaaaaaacccattgtcttagcccaaaagcttcttaggctgataaacaacttcagcaaagtcttaggatacaaaatccatgtgcaaaaaacactagcattcttatacaccaacaacagtcaagccgagatccaaatcaggaacaaactcctattcacaattgccacaaaaacaatagaacaggaaaacagctaactaggaaggtgaaagatctctacaaggagaactacaaaccactgctcacagaaatcagagatgacacatataaatggaaaaacattccatgatcatggataggaagaatgaatattactgaaatggctatactgtccaaagcaatttatagattcaatgctattcctagtaaactaccattgagattttttacagaactagaaaaaaaaaaactattttaaggctgggcgcagtggctctcacctgtaatcccagcactttgggaggccgagatgggtggatcacgaggtcaggagatggaaaacatcctggctaacatggtgaaaccccgtctctactaaaaatacaaaaaattagccaggcgtggtggtgggcgcctgtaatcccagctgctcgggaggctgaggcaggataatggtgtgaacccgggaggcagagcttgcagtgagctgagattgcgccactgcactccagcctgagggacagagtgagactccatctcaaaaaaaaaaaaaaaaaaaaaaaaaaaaaaaaaaaaaaaaaccactattttaaaattcatatggaataaaaaaaaaagtgcctgaatagccagagcaatcctaagcaaaaagaataaagctgaaagtatcatgctacccatcttcaaactatactacagggctacggtaaccaaaacagcatggtactggcacaaaaacagacacatagaccaatggaacaaaatagagaaactagaaataagaccacacacctacaactatctgatcattgacaaacgtgacaaaaacaagcaatggggaaaggattccgtattcaataaatggtgctggcataactggctagccatacgcagaagattaaaactggatcccttctggccgggcgcggtggctcacgcctgtaatcccagcattttgggaggccgaggcgggcggatcacgaggtcaggagatcgagaccatcccggctaaaacggtgaaaccccgtctctactaaaaatacaaaaaattagccgggcgtagtggcgggcgcctgtagtcccagctacttgggaggctgaggcaggagaatggcgtgaacccgggaggcggagcttgcagtgagccgagatcccgccactgcactccagcctgggcgacagagcgagactccgtctcaaaaaaaaaaaaaaaaaaaaaaactggatcccttctttacaccatatacaaaaattaattcaagacagattaaagacttaaaggtaaaacccaaaattatagaaatcctggaagacaacctaggcaataccattcaggacataagcataggcaaagatttcatgactaagacaccagaagcaattgcaacaaaagcaaaaattgacaaatgggatctaattaaactaaaaagcttctgcacagtaaaagaagctatcaacaaagcaaagaagcaacctaaagaatgggaaaaaatttttggaaactatacatccaacaaagatctaatatccagcatccataaggagcttaaatttacaagaaaaaacaaacaaccccactaaaaagtgtgcaacggacatgaccatgcacttttcttttttttttttaattatactttaagttttagggtacatgtgcacaatgtgcaggtttgttacatatgtatacatgtgccctgttggtgtgccgcacccattaactcgtcatttaacattaggtatatctcctaatgctatccctccccactccccccaccccacaacaggcccaatgtgtgatgttccccttcctgtgtccatgtgttctcattgttcaattcccacctatgagtgagaacatgaggtgtttggttttttgtccttgcaatagtttgctgagaatgatggtttccagcttcatacatgtccctacaaaggacatgaactcatcattttttatggctgcatagtattccatggtgtatatgtgccacattttcttaatccattctatcattgttggacatttgagttggttccaagactttgctattgtgaatagtgccgcaataaacatatgtgtgcatgtgtctttatagcagcatgatttataatcctttgggtatatacccagtaatgggatggctaggtcaaatggtatttctagttctagatccctgaggaatcgccacactgacttccacaatggttgaactagtttacagtcccaccaacagtgtaaaagtgttcctatttctccacatcctctccagcacctgttgtttcctgactttttaatgctcaccattctaactggtgtgagatggtatctcattgtggttttgatatgcatttctctgacggccagtgatgatgagcatttttacatgtgtcttttggctgcataaatgtcttcttttgagaagtgtctgttgatatccttcgcccactttttgatggggttgtttttttcttgtaaatttgtttgagttcattgtagattctggatattagccctttgtcagatgagtaggttgcaaaaattttctcccattctgtaggttgcctgttcactctgatggtagtttcttttgctgtgcagaagctctttagtttaactagatcccatttgtcaattttggcttttgttgccattgcttttggtgttttagacacgaagttcttgcccatgcctatgtcctgaatgtattgcctaggttttcttctagggtttttatggttttaggtctaacatttaagtctttaatccatcttgaattaatttttatataaggtgtaaggaagggatccagtttcagctttctatatatggctagccagttttcccagcaccatttattaaatagggaatcctttccccatttcttgtttttgtcaggtttgtcatagatcagatagttgtagatatgtggcattatttctgagggctctgctctgttccattgatctatatccctgttttggtaccagtaccatgctgttttggttactgtagccttgtagtatagtttgaagtcaggtagtgtgatgcctccagctttgttcttttggcttaggattgacttggaaatgcaggctcttttttggttccatatgagctttaatgtagttttttccaattctatgaagaaagtcattggtagcttgatggggatggcattgaatctataaattaccttgggcggcatggccattttcacgatattaattcttcctacacatgagcatggaatgttcttccatttgtttgtatcctcttttatttcattgagcagtggttctccttgaacaggcacttttcaaaagtaagacataaatgcagccaacaatcatataaaaaaagttcaacgtcactgatctttagagaaatgcaaatctaaaccacaatgagataccatctcaggccagtcagaatcactattattaaaaagtcaaaaaattacagatattggcgaagttgtggagaaaacggaatgcttatacactgtaggtgagagtgtaaattagttcaaccattgtggaggacagtgtgacaattcctcaaagacctaaagacagaaataccattcgacccagcaatcccattactgagtacatatccagaggaatataaattgttctattataaagacacatgcaagtgtatgttcattgcagcactattctcaatagcaaagacaaggattcaccctaaatgccatcaatgatagactggataaaagaaatgtggtacatatacaccatggaatactatgcagacatttaaaaaagaatgagatcatacccttcacagggacatggataaagctgaagactattatccttagcaaactaaagcaggagcagaaaaccaaataccacatgttatcacttgtaagtgggagctaaatgatgaaaacacatggacacatagaggggaacaacacacactggggcctatcagagggtggagggtagaagaagggagaggatcaggaaaaataacttataagtactaggcttaatacctgggtaataaaataatctgtacaatgaacccctatgacacaagcttacgtatgtaacaaacatgtacacttgaatgtaaaagttaaaaataaataaataaataaggtctccaccttcactgaactacccgcactctggtgagggtagaaggtagctataataaacaaacaagctctgctatgtcttagtaatctgaccttgggcaagtcacttcacttcggtatgttttcaatttgctcaactataaaatagaaacaatagaaactacctcagactattgtgagaaataaataaaacacatgatataattagcacataaatgttggctctctgagctttggcctcactatcaatcttccagttcctggaacacatgttccttccaccataggaaatttgcatatattctttcctttgcctaaaacattttacatattgcttaccccgaccccagcccttttactttgtcattgcctactcttctttcagatctcgtttcaatccctacttcctcagggaagacttacctaactaggtcaattcttattatatttgtttagaaagacagatataatccatgtttatttggttgttcattcattcattttctcattcattcatccaagaccccatcatcttttatctggattactgcaaaagcctctttctatagtctgaatattatgtctccccaaaattcatatgttgaaatcctcatcctcaaagtgattgtattagaaggtgggacctctcaaagttgattagatcatggaggcagagccctcttgaatgggattagtgctctcataaaaactcccaagagacaccccttgccctttcctccttgtgaggtcagagtgagaaattggctatctgtgaggaagtgggcgctcaccagacaacagatcagccagtgccttaattttgaacttcccagcctccagaactgtgaaaaataaatttctgttgtttataagccacccagtttatggcattttgcttcagcagcccaagttgactgagacacctcctaactagtctccctgctatagtctatactcaacacagttgccagagcaaaccttttaacacggaagtcagaccatgtcacttttctgctgagaactcatgtcacctttctgctgagaacccatcttcttcaggtttcctatcttcctcagggtaaaagccaaagcctttacaatggtttaaattatgcctgtcctcattgatcacatcacacagctattgtggcctccttactgttactattcttcaagttcatcaagttcactcctctatgtcaggatactggttctctctttctagaatggtcttccaccagatatctgcttggtttgcttctccacttctttctggtgtcaacttaaatatcaccttatctgttgagatgatcttgtactttataaaatagcaaactcctcacctcagcactccctaccacctttgccatgcttcatatcactcatcaccttttaatatattttacttgcttatttgttgttttttaatatctctcctaccactaccactagaatataaacttaatgagagcaggtattttgctttgttcactatctccccattctctcaaacagtacccagcacatagttgactctacatctaagatgataacttccatacaacaaactagacaaatttccaaaataaacaatttatacagctgaacaaaatttttgaagttctggtcatctcataatagctaggcaacatcccaatgctctctgggaatttctggccaaactataattaagacgatacatggtgaaacaaaaacaaaaacaaattaaaatattccaatttataaactagatgaggaaaaataaaaacatgagaaagaataaaatggaaccacagattataaaagaaaaaacaatgtaccttttaacaactatgaagcatattaatgttaattgttattggtaacttgaatttactaaacttcctagggttttacttgtcccactgtggctcagatttcatatcaagtatttgtcatagataactttcccaatttcttatattctattgaattatacaaggcattattatcatgttgacatttttaccattaaacacactaacattcagttagacattgccacacatttcccacattccggtaatcattaaattctccatagtaaataagatgtgagatcataaaaaggaagggaaataaaactgaattatatttagaaacaaagatatggtattgtttggggattttccctaaaagttcccttagcaaaccaatcaccactaagtcctaccaattataatttctctacatattcaactggcattcatttcgcagcatctcagatcacctctttcacttcccatccttctactcctactaactcaaaaatatagttaccttcattgatagagatggatagcaatactgtctttaattagcaccaattcacttatgacaaatatctgcgccccactgagtgaagtaggaacaatgaaaagacatcagcaccattttaaaagctctttaagaaagttcagaactccagttcttaattcaaaggcatatgccaagttaattacagtcaaaagtgtaactatctctctttaagtcaaaggattcaaaagcaatttatgaatgatactgaaataatgtattaattagctgtccacatgctgtcactcttaagagttttaaatataaaacaaaataaattaaaaaggttatttttcaatacgaattattttagatgtatccaatgatacaaattgccgtaatcagaaacccagttttacatttgtcttatttttttaagtctcagctttttactacgttatttttctagacagtgggtctcaatatttgtggtgattagaatcatctgtggaagtcatttaaatgaagattcctgggcatctagagattctaattcaaaaagttggggtgaaggatcaagaatctgccttttaaacaaacaccaaaatccagttattcagttagttaatccagttagtgtgctcacatcatagaaggagaaatgctgatctagaaagcattggtagtagtagcccatttcctaccaattcttaacaaactattcttctcccatgagtttcagctcctagtacatttcatcttacatccatgactcgaatattaaaaccatttattcaatgggcattctgtgggggcttgctgtacagccagtaatcttctaatatttaaggtttatagggctacatgatttctgctttgggattcaaaatgacatatcaaggcctttaaaaataatcattctctccctatagaaacctctcgaaccagactgaactgccaaagatagactaaccaaaaactttaggttcgcagtattaatttcacctgaaattataaagagaggtaatattcttgtccttttctaccctgaaaatgttaacaatagcaaatagttttctcataacaaaacacatccattcgttatttttccattctcttctcccttttgaagaaaaaaatgacgaagcccttccagagatttttaaagacagagtgaacactgactttatcaatagaaatatgaaatatagcatttagtaacaaatacaattgtgagtatatgatatgtaagacgttgtgcaagaaggttttggtaggcagatgaactctagaacatgtggtctattaaaagaccttattaggtcagctagatttggaatatgacctataaaaatgcaatcagctttcaattatcaaccaatggatcatccacttgccacttatagttatattttggttattaatatatcagtcctataaataacagcttccaatttaattattttattcttctttttcaaattttggggtttttgttatgtgctatttaacccatccctcaaactcaggagacttgaagaaggtcagtttgcttaaactagttaataaattaatgctgactattccctacttggactgagcatcaaataattaagcaatatgagcaggatgaggaatgctgaacttatgtaacagaatattatgaaaaggataacatacagtttataaactattaaatctccgcttcagagtgccttgtatatatgttgtagctaatattcagtagcaaactaaaatttaacagctctcaatcatctacaaggtagttcaaactccttaataagacacaaaggccttcaggattttaaccatatgtacccttctagtcttaggccacatcactttctcaaaaaaaagtaataattgcttaataatttaatgctttccatttaccaggcactacatccaggcaatttgtttagcaacattataaatattaattatattttaaagtaggaaaacaggctcagcattttacccacaatcataaaggtagcataaaatgaagtcaactctgctctgactgactccaaagtacacactctcagtcatcttcctcatacccctcattccagccatgataaacgaacatatgccatgacctttgatgtctccatacttttgctcatgtttttctgcttctggaatgtccttttttacccttgtcgaccaagattgtcaaaattcaaaaaaaaatagttactaaagttcctggcattgttacaggcacaagagacagactagtgtgcaagataaagatgctgccattatggggcttgctctttctttgagctcctactcttctactaatacctgactcaaagtcactgctttgatgataattccctttacatgtcttcttaatttcttcttctattctctcatagcactttatatagacgtttagtgcagtatatcatattgtactataattgtttatgtatctgtctcatcttcctctccagcctacaaaattctttgacgtaaaaggcccttttctatttgatttgtatccttagcccttagcagaatacgttgttcataagtaagtgctcaataaaagttttgaaagtgaatagaaaactagaccaaatatttgtctgagatgccatataaactaaacattaaaaatacttgagagaaaatatgctacaatttataaaatcagccacaaaaaagtggcagtcataaatatttaaagatatatttaattattgccttggtcctttttaatgatcaagtttatattagatgttatataaaatattcaataataacagtctaacttaaatatttaaccagctgacataagtatacaactattacgcagcctcatagttcaatatttaagttaaataatagtattcaccacagttgaaacttaaagttattatttagagctcatctgcactgccaatgaaattgcaggtattaattcttccgagtctgattgcaatagcaaagaaaataactattgattaaaaataaaggcatatgaataccaataatttttcagggtacaaaaatttgcatatgtatatttatttctgtgttaaatcacatgattttaaatgtaatcaaatttaatttcttctgaagaggcttgtgattttaaaaactgaaaagttagccttagaacatattttatatttttaattggttctatatcttttgcaaattccgaattatctttaaattgtcttcacataatgatataaatataaaacaccaacttgcaggctaatagccaaagcataaaacttgtatgtaagtttccctttaagaatatgaactctgtaataataccgtctattagtcacagaatcatagaattttagatctaaaagagccagtgactgccagcaaaccaccagaagctaggaagaggcaaaaaaaagattccctacaggtttcaaagggatcaaggccctgccaacaccttgattttagacttctagcctccagaagtgtgagacaatacatttctgtttgaagccaaccagttgatggtactttgttacagcagcagcagcagccctaggaaattaatacacctaccaaaaaagtctttcagcaaaactatttcaaattgggaaaaaaaaaaaagtttcttctccctttttgtttcttctttttgtttttattttccttctcccttctctttctttcctggttgctttcccactgtttataaacataattatgttctccctattccaaaaaaagacccttccctcagtggtctctctccattaagggattgccccagtcacttgctacctcagctaccaggctcctttagaaagtgttctatccctctaccactatttcctcatcaacatcctcacagtgcaggcccttgccatctagccctggccttagcaacaagctccgattgacaaatcctcattcttctaaaattctcaacagaatttgatactcatatatcaaatcaataatgattgctgttaaaccaccatggcacacgtttacctatgtaacaaaccatgtttctgcacatgtatcccggaactcaaggtaaaataaaaattaaaaaaatagtgattgctgttggtcacttccttcttactgaaattctctcctcttttgacttccatgacataaaaacttatttttctctattctttcattgctcttctcccttctccctttatcattcccccaggatttcaatcttaaggtgttctatctctcatttcctctctcgctctttccctctctcctttcctccctcttccctcgctctctgtctacagccatatatcatctatcactcctttgcaggtaactcccaaatctctatctctagcccagaactcttttttgagttccctactcatacttacacacaatgtaattttgtagttaagagcacagaatcatgtacacctaattttaagtcctggctctgtcatccaccaactcggcaacttcaggcaaaatagttaatctttctaactctcagtttcctcatctgtaaaataggttttgtaataataatatctactttactgggttgttggaaggattaaatgagaaaatagattctgagcagtgaataattgtgcctcttgcataagaatttttcggtaaatgacacttcgctctcattttaactgtctgacatctccacatattgctatatgtagcctcttaaattcaatatgcatgtagccactccactgtgttctgtccccaaactatcatcttttcatggaatcctagccttctctgtgaaccaagcataaaatctggccaaaaaatgtaggcacatttaagaatgtaagggcctggccaactgtggtggctcaaacctgtaatcccagcactttgggaggccaaggtgggaggattgttcaaggccaggagattgacaccagcctggtcaacatagtgagactccatctttacaagaaattaaaaaaaaaaaaaaaatagccagcatggcattgcaagcttgtagtttcagctaatttttaagtcctgggtggctgggaggtggactgaccccaagagctcaaggctgaagggagccatgattgtgccactgcactccggcctggggggcagagcaaaaccctgtctctattttttttttttaaaaaaaaggtaagggccttagaaattctctctcctgaactattttaaaattaatcttattctatccagtattacagtcagtatatattttcccatatccccatacccaaccccactagattgtgagctccatgacagcagagatgttttatataccttgtagtacctaaaagagaaccttatatattgcaagttctcaaagaacatctgtttatgtgaattaagattaaaggtcttataagtaactaggttcataagctaagtttaaatactaagtagtttagtttctctatcaccttctcttgagcaagtctcctaaaatcattcttgcaattcaggacccatagcattctaccacaaaaacaggggcaactaacattcagtgaaagcttactatgtgccaggcactcttctcagcacttgatgtgttaaaatgttcattcttccacctgtaaactacataatatggggaaaattatttaacttgtctgtgctgagtttcctcatgtataaaactgggaaaatagatataataaatacctcaaagagttgcttatagtttcacatgagacaattcatttaaagtgattagtacagtgtctggtatatggtatatgctcaataaaagttgttattgtaaaaatataagcatgtgtgagtgtagggaagatctttttcttaactatagccatcaatcagtaaacaatattggataagcctgtataatgagtaaatttgatgtatgaaacaaacctactagtttaaaaagaaggttatcaatgagtttaataaggaaagacaaatcaagtataggccttttggaagtatgtatgtttttgtgtgtgtgagtgtgtatatgtgtgtatacatatatatacactatatatgcaaaataaactgcaacttatttttaaataaaatttaacatatgtgtcaatttgctttgattcaagtaaagagtatatagaaataagtgtaaccatttcctatacatcaacttgaaattataataagagatttttaaaaattaaaatgactaaaaactgaacctaagtaatattttaagagaaaaaatttcaaaattgggcgatatttacctcttttcatttattttgctggacacactgattgcagcatccagagatggaggcatgtaaaaatgtttgtagtttctttcctagaaagagaatggaactaggtatatgcagaattggatatatgagcagcttgttctaacctagtcaagaactttctatgaattctttattttgaagaatgttaggaatacaggaaatcttcaagtctttcttagaacccatataaatagtgtatcaggctctgaagaggatctggtctaataggatcaggatctgatctacctatctctgtcgtttggtgatactctttctacaatatcagtgaaaaaaaaaaaagaagaaaaataggggccagaggggcagcagatttcccttccttccctagggcacaaaggagaagtccatgatcaggaaatcttgagcaacctttatagtccctaggtctaaaaagagatccccttgctcgctccttacctcctgatacctcttccagctcctaccctttaaatgccacagaagtaaccttataataaccttctgacaagaagtacaggagagcatgtaggtgaataggaagaagtatattgttatgttcttccaaatttctagccaaaagaacttttttcatcaggcaagtataagagaaagataagacagagagttttcatcattttcttcactcttcataatctaaatttcgcagtagcctccagtagattggcagagaaaatgaaattaaatatctaaaagctgaatggccaacagaaaaactatgggcaatattaatgctatttatcagaataattatgctactattcacatttctcctatttaagttgaaacgtaaagggaatgtaatgcagagatacagaaccagataaacagagagccttaattacagtcactccaaatacaattctatttcttttatttaattgtatttctatcttctattttaagtagaatctcatgcattcattttataccacaataaatagccaatgtgtaatggcatttatcaactgctcactaaaacaaagaagttgtatcagggctgacacaaatgattgatctaattagagaaatgtatataatagctagtttcacaataaagattatggataaagtaagttcttttgtaattcctctaaagaatactatatagaccttccaactgatctgaatgaataataaattacacagctacagcaccaaaaaatggctttaatcctttatctctcaaagtatagccacttccttcctggcagagttcagatcttgagattcctcttccataaaattttattcacaaactgtcttttcatggtatcattccctgtgtaagaaattgaatttttacaactgaaatttacagcagggaaacagtatacagttgtctttccacagcaagattgtcccaataattcctacactatgtaatttcagttaaagctgccaaccatagactataattaagtttaacattcaagacctcactacacctctctataaagtgtaaacacagattggcatacaactggtatttctgaagtgtctagattctccactttcatacatttaaactatctattgcacactttaagttccatatatagacaccaagcactgaaggaaacaggaaacatgttaacatgactatagcattgatgaataaaaaaacataacctcgaggctaagctgtcaaataagtagtgaattaatttctgtaaagtactccaatattacaaaggtgtgttgaaaggtgtctgctcatgtttcaaattaaacgcactgctggtcagcattagcacctcagctttgaacaccagccatttgcctataacacttcaggggctaggaaaaacggatttgccgttcacactggaataattagaacatgtcaggaagaattaatttcctcatttttcaaaaggatacacagaaattaccatgttattatatgacagggtcccttggagaattatattaaatttaatttctagcgcagcccacacaacaaattaaagtcataaataagatggaaagaagcaggacgcagagcatatgtttatggcaatgagtgaagccaagggaccagaaacaactatcttcatttcattttatttaaatcagccagacactgtgtatctgaatgacagcacttgttaatggtgctgagattataggctccttaattttagaaaacagaagcagtcagtcagtgtctaaaatagtacatttcctacaatgcaaaaattagtataaatttacttccctttcaagtccatttctttttgccctgcagcaagtttaacaaagataaacttatttttaataatactgtttctctatttgtcttcactttgggcaattttcttggattaaaaagaaaaatgtaagaagtaaaacagaagagttaccaggataagtgaaatctgcaaacacagtgtctgtccagaatacaagtttcctgctccatcctgaaaatacatctacccattcagggctgagagaaaaatttctccaatggaaaatttgtttttcatattaaatgaaaaatgactttttcatactgcctgtcaaattggagtgaaactactaagggtatggttcagccaccctaaaagcactggatttttaactattcatgaagcccaaatgtgtgtagaacagaagagattctacagcccactaatactatagccacccctcatgtcacatccagagacttcctgctgccctctcttcctgcttaagaatctctcctcaggtaccacctcttttccttccacctcagttagacatgtacactcagtaaagggttcttgcttatggccataccatctactctgaaatcagcccaagtgcagcacagaaacattaataaaactaataaatgtattataaaatattaatgccattattgatgcccttccttctcagtgcacatatatgtacacttttatttgttatttaagttatgtgtaaaataaccagactagaagcaagtatataatttttccctatatgctacaaaaaacactcaaggtgtcctgtagatattgatgcttttgtattgagaggtcagcacctctccaacattgaaggctagcatcaagttacacctccctgcagcaatccaaatgcttcaaataccaattatcaaagcaatttatattatttactattcagaatttcttaagaatgcatatcttaagaatgcatatcttttaacataaaatatcctcaatgtatggcaaatattcgaaaattgtaaacagtgatgtttagaaaactatttaaaatgactaaaacaaaaacaataaaaaagctgccataaaagaggtcattaacaaacttacataactttttcctccttccagcatagatttaatctccacatagtcccctacaaattctaaatcataaatgttaagattactcacagctccagaaacacgccggtattttatcatccttaataactgaagacattcttaaggtgaaaaaggagtttgtacactttaagaaatgactgtcgtgaaactgagcactcccttgggtgcaacaaactttaaataatttgtgaatcaattaactggcaactctcttcataacacagatctcacactcccaggtcactgcattatcagcctgatacaaatcataacattttggagaaaagttcataattgaaatcattaattaatttaacaggacttttagttatgcattgcattaaacagctgtaaaggagcagagattaattagttgtttctctgacaattttcactgctgctatttacttggtggaaaacttttcaacttgtaaagcacatcatgctctctataatctggtagtgacctacccaagcaatttcaagttgaagaaattatagtttctctaaaatgaagtctggagactctgaggtgtttctctgaaagaagaaaaattaaataacaaatattgtaaagcctgaccttatgcttatgtgaaaatgaaacctgcctctggaataaagccttaaaagtatatatcacaagtaacacagaaatgaagaaaccaaagttatgcccagctaacatttccctgaagctattaaaatgacatgcattcacatattttgcatattaatctttttctcttaaatatataaatacaaattattaaacaaaaataaattatatttatgtgcatatctactgcctttacttcttagaatttggaatcatctgactgacctacaagttgctttagcaaattattggctagcaaagtataagaaaattcaaaaagcaactcaaaaaggaccattttaaggaaaaatgactagcaatttttgcaatacatcattccaaagtcctttcatatcacatcacactccgtacaacttcatcattttaacagtttaacatctcatctactgtaagaaaggcactaaaaagtatgtgtcaggagattataataaaacaggtaattccctagaaaaatacgtatcttatcaaaattaattagttgaaattaaatattttccaggttcatatcaggaaataatcaagtgcaccaccaaaatcacaagaattttttttcagcccaatcctttcccccattccctctgccccacatgcagcaatcatactgaactttttagaattcctaaaatatactagtcccttttaatgtctggtgcatttacaaatattatacccccatattagactattttatctccatgtcctctccagataattccctataaaaggtagctcaagtgttaacctactcaatgaagcttccccccagttcttccggacaaattacacatttctacatatattttttcattcatatctcaattctaagactaatctgctatgatttctcctttacttgtctctacattagagttttaagttaacttaaaactaactttagtatgctattcacatttacatctcaaacatgtctatatggaacatttcaggctctccataaatgtctgtggattgaaagaatgaatgaatgaacatgcacatctttatctctgcattttgatttaataatatttatttagcacctgttgtaaaccaaccacagtgctaggtccttgacaaaatctccacaaattgtttttaagtttaaaaagaaagcctctatttttttcttttttaaaaaattcttttaaaaatattttattctaacttttattttaggttctggggtacatgtgcaggttttccacatgggtaaattgcatattgctggggtttgatgtacaaatgatcttgctaccctgatagtgagcatagtgcccaatatgtagtgtctatatttttaaaaacatttgccctggactgggcacggtggatcatgcctgtaatcctaacactttggaaggccgaggcaggcagatcatgaggtcaagagatcaagaccatcctggccaacatgatggaaccccatctctactaaaaatacaaaaattagcttggcgcggtagtgggcacctgtagtcccagctactcaggaggctgaggcaggagaatcgcttgaacccgggaggtggaggttgcagtgagccgagatcgtgccactgcactccagcctggcaacagagcgagactctgtctcaaaaaaaaaaaaaaaaaaaattgccccgacctttttttaagtattttgtattttgtttaaaaattagtaattattacctaatgagatttggaataagaaaacaagaagcaaaaactgttataaaaaaaaaagtaagttgttttagtatatcattttttctgtcaaaatccctttgccatcaaaagatccatttgtcagaagtcaaattatacgaatgtgttaaaaaatggtttatgtctgtggttctgccaacactctcttacctacattggcagaagaatgaatctttgtcttttctgagatagcatggaataaagtaatagtaattacagtattattatctcccttaggtccattatttcccataattcgctgtggcagtaaggcaaatggtaatggctcatgtcttatctttcacattttctcacttatatctttacctcttacttgtttctcactaatttagcccactataatggcaaggataagttggcatcttcttaaaatgttaacctttacataagaatctgtggcaattttgttcacagaattcttataagaattaaatgagataacataatgtatgtaagtcaaaacaagttagtccccttccctccctcttaccctgaaaacacataaactaagaaaatgtgtcctaaagcaagttgttattatagaatcattctgacatagtgtgcacaattggctccactctgcagatatttgatgagactatttaataagaggttaaagagagaagcaaaatgtgtatctttgttagaaatagttgaatggatttaaaaatttaatagtgaaattaagagtgacgaagagtgaggatgaggtctgcctaagtgggttacagattgctggaaatgtgctcactttcgctcagccagttacttgtgaccaaaaaggtcatggttagatgtaaaactcaaagtcatgtaacaaaacaaagttaacttccacatagaaatcatgctcaatttttttctgtacttgccccatcataaaaattaatttgtcaccttaataactagtgaacctaaggtgttatagggaagtaataccttgatagcattatatgattctaagacccagaagaatcctgaatcaagaatagaatacttttctaaaaatgcatgggcttgcattctacatagagattcacattaaaatacataaacatggtaacactagagtaacaatagacccattactatagactcaataagtcaggaaactgtcatttacataatccaccaactttgcaaattatttcccaacaaataacaattactgttctccttcatctccggtctcatctgaatatactaatgctttaatttcttgttctgcaactcactctacctaccaacacactttaaattgccccatgatttgcatattcgtccaacatggttgcagccatgtatctgtgggcatttttatatccttattcataaaccaaatctgtgtacccacagagctattgggaaacatctcaatatatctcatttacctattactgatcatgttcttactgcactgtatcatcactgaaagaactccttaccttcctctggtcctcaaagcatatttttgtgcaatacttttaatccaaggtcatcctattccaccttgtgtgagtacccttgaggaggctggttttagaatcctgaccctgagttcattgaagcttagatctagtatacttgcctgttttcaattctcctctggggtagcatcacatagctattacatattgaacaagtctatctccttgtataaaagtatgcccacaaaggtttatttatagttaatgtggcagaagtacctggattaatgccaaattttagtttggaatctttggtttttctctaatggtcatacaatatctacagaccaatcttactcctgagaaggtaacaaagtagagggcaacatttcaacattttccagaaataggacaatagattcctttctgaaagtgtgtgtttgggatatgggagaaagacagagatgcaaaaaggcagaatagacgttatttttctagattatctttttaatgagccaaaacaaggtccagtagcacctaccttacctagatgattcaagaatcatctttctaataaaagaatgaagattacaatggagattattataagggttgcatgtaagaatgcaaaatgaaggggcaaaagagatgacaagatggaggagagaagaaaaagagaggaaagaaaggagaggagagaaagaaggaaaaagaaagagacagaaagtaggagagacaaagatagaaatagcctactattaaatttagaaatgtggcagggtttggagagagggaaaaagagatcataaaagccaactgcacccgttattttctttttaaaatattttctattttacagaaagggactggaaaaatgaggtaagcgaattaccttcacaaatactcattttatttaattagcttcatggatctgatagccccacaccttggttaggaattttagtggtcatatttctgcagagttaaagtgatcccaaacaatttctccaatgtattacgcacataaacaagtttttcttcaaaaccaggcgtgatggtcattttttcctccattttctcttcaataaacatagttattatagaaaatgaaaggaaaattccactcttcattcatgtttgagttcctctgacttgctaaaatatactggcctgtagcataagatgtaattccatatttatctatttcttttttacttaaaaagaagacatacaaggtttaattatttaagatattaaaagaatagtaagtttttctatccagcattctggagggtctgttttccttccttcctttctttgtttctttctttccttctttccttctttctttctttctgtttctttctttactttcctccttctttccttttttccttcctttcttccttcctccctccctcctcctttcctttcttccatcctttcttcctccctctctcccaccctcccttcctccctttcttcccttctttttcttttcttctgtgcagggaaaaaattattttatcaagaagtttcaactttattaaaaatatgcaacaatcatcattaaaagtctgtttttatttgctttgcaatacaactcttcacaaaaaattaaaaattactttaaaaaattaagtaatttttaagctaaaattaggaagttattaggatttaggaaaagagcacagtcattgaataaaccaatcttgaatatgaattctggctctatcatttactgtgctatcagaaaagtttgtgctaccactctgagccccaattataaaaatgggtacagtaatagtttttaccttacagggtaattatgaggattaagtgagaaaattatttctctctctccttcgatttctctctctctctttctttctttctttctttgtctctctctctctctgttgtattcacttcagtatatatagagagagaaacagaaagagagagagatagacagaactggcacagttaatcacttgatacatactgttattaatagattatacactactagtagagtacaaaatttatcttcctaatgattttattcaaacaagcaataaaattaaggtcctgtggaggagacttagttctttgaaaacaatggcagactaaataatatgaagatcaaaacagggaaaaaaatttgcttactttaatgcaatagttttcaaactgtgtgttgaatgagtgacaaaatgaatttttggagtcaatcagcatgactactgtacaagacagtgatagcatacaagaagaaggtgcatataagtggttgtattcacttcagtcttacatccaccaaatcagtatggcggtcagctgtcagccaaagacagggcagaaacagagctaatcaagttgtgttaagtaacccagtcattgcacagaaatctgtacagttcttgttccctggcagtacagctggcaacagcacagatgtaatttgagggattttctataggatgcttatgagtttgacttcactgttggcttcttgtcactgcaacctatacactggataactctgtttatgaggaacccagctatgtgcttagaggaagaagaatcagatttttcacttggttggtgggcatgaagtcagctgagttttcagtttgccaaatgtttctgcatattttttcaaatgctccaggttaataaaaatacatgatttgtattgccaagcacctttcccctacactttgagctcatgtgtttccttgggaaactaaattctttctattttactcataactcatcaaactgttatcttgaaactgactaatctttagagccttttcaatatcactactctcatttttttttccccattaccctccttttattcaactttcccccttggcaataaaaaaagtgcaattttccagatttcaagtgaaagaagtgaatatgattcaaaattgctgagtttcaaaatgatatgaccagataacttttccatcacctacttacactttcatatgactttcttctgatactcttaatagatataatgtaattaaacagtaattactatccttcatttaagtgaattgtcctatatttaagaatatttaatttgtggtcaacctcagctacttcctatacgaatgtatcaccctatctcatacaagacctattaaataatatattacagggcaagtacagtggcttatgcctgtaatccctgcattctgggagaccaaggcaggaggatcccttgaacccaggggttcaaggccagtctgatcaacatagtaagatcctgtctttacaaaaaacaattttaaagttagctgtgaacagtaatgcacacttataaagctgtatattaagactaaggcttaagaaacccttgagcctaggagttcaaggctgcagtgcaagctatgattacaccactgcacttcagcccacgtgacagaatgagatgctgtctctacatgatgatgataataacaataatatatttcaaaactattctggtattagaaacttaactactcttacctgtactaccatttaaaaaccaagagtccaaattgtggggcatagggtggtagagtaagtagaagatatacaatgaaaatacttggaatatactgtgaggcatgttgaacgagcagaagtattgggtttctccatcctttggctaatcagtgtaaaattataaaatgctccttctttttttttttttttttttttttttttttttttgagacggagtctcgctgtgtcgcccaggctggagtgcagtggagccatctcggctcactgcaagctccgcctcccgggttcgcgccattctcctgcctccgcctcctgagtagctgggattacaggcgcccgctaccatgcccggctaattttttgtatttttagtggagacagggtttcaccgtgttagccaggatggtctcgatctcctgaccccgtgatctgcccgcctcggcctcccaaagtgttgggattacaggcgtgagccacggcgcccggccgccccttctttatttttaaaatatataaacctccaattggttgcctgccatgtataagcagacatacatctccacaacagagccatgaagatcatcacatccttcctctttcagacaggatacccagttactttctttctacagctagggatatcagtaagtcctcctttcctcccaaattccatctcaataggttttttgatttccactgctagaatgcactgtgaactggtagaatggaggtagaaaaagtcaaatcgcactaccaaaaattcatcagaataatgctatgaaagttagatttcaaaatgagagttcaaaatcacttgacagacagttgctaaatactatagcactatcaataatattattcagccacattatatagtaaatgggtttcagtaggttgcccaaggaaccaaatcaccatctacaacctggtttctatgagactatctattccagacagctaacttataactttcagaaccttacttattagtaagttggaaactgcctacaaatagacccctgcgcaaacttcagagaaatctttttgtgatgtaaaaaaatactaaaaatccaggtaactgactatcagctgttaagtaagtcatatgccttaaaaaaggagaagcacaattttttaaagtagcaagaattcaacataaaagttataaattactccatcacttaccatatatgaagtctgagattttcaaatacagaacttggaagcatgcattaacaaatgattattagtggctattgcacattgttgatacgttaacaacaaagagtgaaaaccatattgccaataatatgtattatggataatggggaaaatatagacagcttctaaatctgttaccattttcttctgaatataagtgatttggatgctgcctttaaaaactacacagatcaaactttctaacctgggcactagaaaagttaatacaactacaagtcggtccattctcatgcaaattccagagaaataactcaatgcacatttaaccatctgcacaactcaatgctttcttttcatatatgacaaaaactatgtggatccataaaaatgtcacctgagcagagttttgaacatctatcataagaacttatcataaagtcgccaaatatactatattgatatgatgcttaaatgatctaataaatgcccatttcaattggctaagaaaacccagattgctatagaaaggcataaatgttcaccaataaagctaggatccaaagcaaagatgcatggaaataaattatgagaatgtttgtagaaaagaacacatggacttttcagtaaaaattagaacaaaatttacttgtttaatgatttgaggggcactgggtgcagtggctcatacctgtaaccctagcactttgggaggctaaggcaggtggattgcttgaacctagcagttgaccagcgtgggcaacatggcgaaacactgtctctacaaaaaaataaaaaaattagccaggtatggtggcacatgcctgtagtcccagctgcttgggaggctgaggcaggaggatcatttgagccagggatgcagaggttgcagtgagccgagatcacaccattgcactccagcctggacaacagagcaagatcctgtctccaaaaaataataattttgaggggagaactttctctgaggtagcatatattataactgaatatataattattctcccatttttaatataagggatcaagactcatgaagtcagagggttgtctgtaactaactgcaccctgacattctcattcgtctaatgagcctgaagtcccacagcaactgaagattggatgtctgctaaggacttccaaaagccttcccccagagcacatgctagtaaacaccacatagtattatccagccacattatggagtaatgtgtacatgttacttactcattcttcagccactccctttgccgttagtaatatctttctttaccagcatgctgtccttcagccatataagttgtgcattaaaataagagccctactaaccatcctgtcagtgcagctggggatggaaggcctattcattcagctgcacctgctgaagcagtccatcattctgggtattgtgcatcctaatcaactgtgaagtagtccattaaagaagcatgtttaaggtcaggtgcgctggctgatgcctcccaacactttgggaggccgaggagaaaggattgcttgagcccaggagttcggaccagacctggcaacatagtgaaaccccacctcaaaaaaaaatttttttaattagccagacatggtggtatgcacctggagtctcagctactcaagccatggtcatgccactgcactccagtttgggtgacagagcaagaccctatctaaaaataaataaataaataaataaataaataaaataaaattttaaaaagcacgtttaagtgatatggccttgtttgtgatgaggcaaagtatgtgtgtgttgagtacagctggataaagttgtagtgggatatatctgcataaatacatattgctgcatggaactaaatttatcattttcctcttgaagtatgtcacagaacaaaaagctacagttaacatgtggtattttatcaaataaatccatgtctgtgtgaagggacttaataggacaacagggcagcctctcacatatgagttgggcttaggggaggcagcctttgttctttctttgcacccacagcaagaaattagaaaataaacatatttggaaaaattattttaggttttccaaggaaaggggagttaagaaagcttgaggattcatgttcaaaaaaactaacagtaagtcttcatattaaactatatgaatttattcacaaagactatacaagaatgagaagaatattcttatcaggaaagttaagttcaaatgaaatgttttttaagcttgattttgaggaagcctccactgtttgaagttttcttcagtagttctaaaacaaaaaaatctgtagtgctttaagtgaaataaaggtaaatggcatttcatttcaatgtgctgctatggcctgtatgagttgaactgtaaaaatgagatttcctgggactttgctttcccttagaaaagaaaagaggaaaaaaattttacatagtcatgaggcacagggcaaaaaaatggacatataaataactgttagctcagtgtaaaggatccctgaagaaagggaagaagcccaggagatgtgcacatcaaataaaaatggagaatatggctatatttcaactcaaaccaatattccctttttaggaatcatcccctctggctcactgctgacaatccatagataacgaatgagggagatgagttcatgagtaagatgaacagggatgctccacagcaggtaaataaatttgtttccactgagataattattcttacgtgtgtcactgctctcatggcataaacaggacaggtgatgacatcctataaaacgcaatttttattcccatactcctgatatcaaggtgtataatcattcagctctcacgacttttttttcctctgaagctatgagtgggtttttgttactattgttcttggctatttttgcctttttctaaaataccatcatcaactgtacaatactgttaagaaactagggggaaaatgggactgttattattttaggctacctagtcccatataaaggctatatatgttattatgtgagacaggtgaatatcactatcttacttggatttttttaaggttaacatctgcatcttataacccctgtgtagtacccatatcctcaaatctatgccctcttccaaaactcacctcctttcagttctaacctaggcaggaaacaaggaatcacaaacctttgtaccaacaaataatttttcctactataattcattagtacgttattccaaaagcatatgaatacttacaagatggttaatcctcattaaaaactaagattacatgacataattacatgtaaataagaaaaatgaattaaactcttaccctttcctatgtcgggcactagttgtgaatcatatatacaattagagttatattgctaagctaaaaatattggtaaagatctaaaaatgacaaacagtgccttttaaattaatgtcttattagttgagtgaagtacactgacaaagaataatttatgcttattcaaactgcactcgacatcttcaggtgtttccaaatgagctcacagaagagtgattaaatgcatctgataacaagccacacattgctgaaattacttaccgcctcattttatgattaattaaacatgtagattaaagttgcaaaagaatttagattaatgagcaagttaagtcttgctgatataagtgaattgggaattggatgctctgtggaactttataaacatgcattttataatgaataagacaaggctacatgcagaatcgtggccactagggccttttgatgatgcagtcttttttaacatggtttgacagctttcaaataacattcttctataggttttaaactttgtgctttgctgtaaaacacaagactacataactcacgtaccaggagtacgattattttttagctctccaaggtaatgacccctgtagcagcagctgttcagaaaaaaattacaagctcaattgttattttaatcagagatagttagcagttaaaagcagttatgcaacttgtaaaattatatgacacctcatcagtagcttctcttgaacactccttcttccaaaataaagccatcccaaaaaagtcataactttccagaagacttattagcaaagcagggtgctcagtcattcataaaatattcaagccatatttattattgtggtttctgtactaggaaaggtaatgtttaagtttatgatgactcttgcaagctctaagagtgtgtcaaaatatctgctagggtttgctgagtacccgatttttctcttttaagatcagctttacctaatccaagcagcttagatagactgtgtcaaaaggcgagttggactttatgacttttccagggcaagagaaatttacattgctaacagaaatgtagtgcattctcctttgcaaggaaaacagaagtggaaagaaattgagccaaagtaaccaaactagtttatggttgaagatctattccattatagcacaatgccatttattactaccatagcataaggaagacacacctacaaattattttaattgatccaatctgctatttaaaacatacttctaattcctttctacttatttatagaccttatgcatgatttcttggcagactgagatttttatagtgctaaacttttttccctttaattctgatctcttagactctaaagacttagcaagaaaacttagaaatttttacttacgggtcaaaaggagatgcttcatgacacaggtggcaaattaccttcattaaccccacatatttatcatgtggacataatttcccacttgaagatttatgttaataaaaatataatacttaaatataagtctctgactactgaaatttattaaaaatttaaatcagctttataaagagccaaaacaaaatagtctcaatttgatttctttacttcctttcagttttattgtctgtgtctttcaccacataatgtaaaccacagtttatcaccacaaaaaatttttttaaatattttaaaagtataaacctaaccccttgtagttcgacttgaataattaggatttgtaagtagaaatatgaatttgaatacttcaaggacttttactttatataaatactttttctttatataaaattactttttctttatataatagtttaaattcttcatttctactcttcaacgcagaaaatctgacagcaaagtggtcatatcaacccgaaaggggctgggctagagaaagcttgaaaataactcctttgcaattgtaaaatgtttttggtatgtatcagaaggacacagattattcagacagctcaacaaatcaaattttaaggagcaggatctttccactccagccattgccacattatttttaggcacccccaaattatgaggtgtgtcctggagctattaataatttaataggaattgtgtcattccattggcattttaatacaagaagatacatttatttcccccatgaaagtaatttttataaaataactttaagtcctaagtactgaatatacttaactattatatgtatttattactattaacatgtgttattttttctaataaattctttatatagtttacctgcatagagtacataaattactggttgcttaaagaaaaaagttacatgtttgcctaaaatgtcaaaataggtacttcacctgaactttttaatgaatgggcaactaaaaataccccaaatcagccataatgtgatataaaaattcttaaaccttattttcactaaatcaagatgtcgatttattgtaacacaaattttatttcataacacatagtccagggggctatgaaccttgtatgtcttagaggagattaacatttttttatttcatctataggtttaaaatatatatattaaaattctcactagagactaaactgagataactaaactcattttagtgatgggtttagtccgttttagtgattgggccaaggtttgtcaaggtgaactacaaatgcattaatatccacagtgctgccaaatgctgaattattaacactgtcagctcctcggtttcagttcattctctatagaggagtcttgtgagattcatcagaacttagtcttgcaacatgtttaccagcatcctggaggtaacatgtcttcagctgaaaataagatgactctcaaccaaggaaaccactattgaggccagactgaggtttataaatgcaaagaaccagtctgtagtgaaaggagcagatgaagtcaggtgacacctcatgccagatccttgccaagtcactcgagataccaggcagatgacttaaggtggctgttcatttgccaggatcaacagcattatgtacaaaatctattagttatgtatgtcaatgcagtatctgaggaccaaaaagggtgctgaaaaatggctccaaaatgacaatggtttatcgatgtattctattgactgggcaaattccttagttctcttaaccaaacatagttatttaaccgaaggagtcctgaatttttcctccagtgaagaaataaaagatttccttgtttctatgctagaaccaccttcaaagttcccatatatccaaattagttttgtgggtaagtgcacattaaaagtagtcttttataaactgggaatttagagtataattatttttgaaaatcaaaggtttttaaactttactcataccttatattctatcttgatgggaaagtgaaataaaaactgatttttatgcacagaatgaataaatgaatacaaaagggttcaagacttgtgaaaactaggatttctgatactctgtttttcaatctttcattcaatagatatgctgcctataaatagaagcattcctgaaaaatattgaattgtggtagtaaaatagtttaatttgtgcataaaacttaataatcctaatatgtttaaacacaagttaaacctagaacatgtgaaaaacttaggtgtataaatgatgtaggcctccttagtactggatcataaaaatgcaatgcaatcctaatttgccatggaaataggaaataaatgtgaacatcagttacactcatgtatattatacttaggctcttacacaaagtgataaggaatcacaaagtccttcttgaagcatttttcctttcctcatcagaagatagagaatgtctaaaacaaaagaaactaatagttaatgggcccactattaccaaatatataataaattttctctatccatcatataatcttctcaacaaccatacccatttaacagatgaaggaattgtgactcaggccacgtaatttgatcagagttgcatcaagtgaagccctagtgtattcaactccaaggtccatttgttcttgctgctatactatgcttacttaaagcctacaccatgtttgcatttatgctattttctattatttagaattcttttttgcttcttagtttatccatccccaccgctttcttccaaggtccacctactccaaaaagtatgttgagttttagcagtttgtttaaaagcccttacagcaatggttgaagttatactgactcacacaattgcattttgtaatgttaccaatgttatcatgtatattacagcattgtgctgaaggtatcacaaaattgtttcattgacacatcacaatatatctcttccactatactctcaccttcacaggaacttgatggtgatgataatgatgatgacgatgatgataatatatatcatataatgatgttatatatactacacacctcaaccaaccaccttttgctctcatgttgctctctggtgccccaaaaccttactttcctctctgctttcatttactcaaatgttcttagatttccaaaccacctctctttccttcccaatcaaaaattctattcctgaagatttcataaaaggcataagacactcagtttttcttttatgtaacaaatatttaagcacttactatatgttggaaactagggatgggtagacaaggcagatatttctctaagagcttacaatctgccacaagacacagaaaaatatttgtaacatagatttgtaaatgttgcaataaaagtatgctaacccatagtatattcacctactttgtacccacaaaaattaaaaatttattttaaagtatgcaaaaaagtaatatgggtacaaagaataaagaataagcaatcacttgggaaataagtagttcaggaaggcttcatataagaggcttgataagataaagcttcactgatgaacaggaagcaggaagaggaacagcaatagtaaccatcttttatcgaatactttctatgtgtgaagcactcttaattaaaatgcatactttatatatattatgtaacattcctcacatttgtgaagacttctgcctctggccaagatggactaacagcgaccagatttatcctgctggcttagactactaaaaaactgggcaaaatacatgaaaacaggaagcagcaaaaaaatagtgattcctgagaaaggtaaaacaaatgaagtcatccctacaattgtcccagcttactgcatagagagagaaactactgactgcaatgcacagaggtgaactctaataacttcagtgagttaagaagatggagcttgtagtctagaggagccaaggtatctacagtttgtagagcagagcaatggcaaaaagatacctgcatatagagttccagagatatgcagagagtctgacaaaaacttaagcaagtactgattagtacatgtatatgaagaaactaaccaaggttagggaaagatacacttaaaaggaacagaaggaacaaaccccagagctcatccaaggccaggaataggtcattctcccatcatcaaaagtgtaaagcttcataatacaaggaacgctgatcagagtattagaatggtattgcatcagtagtgaagagaatgatccctgtactaaaggccatcctggttccaaatgacagagcttaaaagcaagcactgaaagcatgacagagcataaaagcaagaatcaaactatttccactttaactgcataccagaaaaaaaagttcaaaaatatttatagaaatacaaaaatactgagcacttaaaatcgtgaaatttacactctctggcatctaataaaaatttaccagccataccaagaagccacacaaacaaaatacaactcatgaaggaaaatcaatcaattgaaactgatccagaaatgacatagatgataaaactagtggacaaggatattaaaacagctattatacttgcatttcatttgttcatggagctaaaagaaagacttaatatattaagcaaagaaatagaatatatttttaaagattcaagttgaatttataaagatgaaaacagactatctgagatgaagaattcactgggtagaattaaaagcagattagacactgcgggacaaaaatacgtgaacttgaagacttataaatagaaacaatctagaatgaaacaaaatgtggggtgaaaaagatgaagaaaatgaactgaaaatcagggagttgcagtgagttgtaggacaacttgaagctgcataatatacatgtataatatggaggggcacgaacaaaaatttttaagaaataatggctgaaaattttccagatacaatgaaaaccacaaacccacagatccaagcatctcaaataacctcaatctcaagaaacattaagaaaactacaccaaagcacatgataatcaaattgcttaaaaacagtgataagggggggaaaaaagcagccagaggaaaatggcatattacatataaagaaacatatataagaattacagcagactgatttttgaaaataatgcaaactaaaagactataaatcaatcagtatatttaaaatattggacaaccaaaaagcccatctgaaattactatacttagtggaataaaattttttcagaaatataaaatgagtttcccaaggacaaatgactaggttttgtatcagtagccttttgctcctctttttcatgtacatatattttatctccactcacaaactgattataaactcctccagactaattcttccttttctattttgaatcccacctcatgtccagaagatctctgagttcatattcttatagtgtgaaggaacgaatgaatgttagtgttagtatgaatgataaggtaatatgaatgacaaggatccccaacaaggtcactttgactttattctgtttttttaagtctattttttaatttttatttcaataagtcttttctcacttatgactatgttctcctgcactatttcctcatcttgaaaaggacaagtagaagagagcctgcatcttaagtataatatttgctgcaactatatctcatgtggacaaggacagaatgtggcaatataaccagggagtcatagtcatcactttatctgagagagttttaaaagtaaccaaactccatgtgcacctgttctattcttcacagatgccatgtactaatccctatgtgagagccacctgatgaaaaagccataatctctagtatcttcaattttctcatactcatggtagctaagttttaccttatgtctctgaaatcatcaaggccctgcctacacactttaggtcctagccttaatatcttttgtatttatgttatgcctctaattcctcaaggcaattatattttcaaggatatcctcattcctttaaaactgtgtctttttcccagtcttccgtgggaagaaaaaaaactgttaattttcagagaggatctaatttatgagatggaaatggatttgcacactgacaagagatatttagtacaatcatttccctctgacttttcaaaaattcaatactgtgatgaacaagaagaaagcaataggagtcattttgactcctttcccttttgcttcccataacatatacccttaccagtcttattcatcgcttgtttaaatcttttaccttttacctgaaattttgcagtagtcctcacaagttgcttctgtagcttctcttttttttaaccctctaatccactctactaactattcactgaattaatttttcaaaagcgaagctcttggcatgctcctggactatttggttgtgatggtcccctatgatctaccgaatgccttagcttagccttatggatcacgatgatatgatcacactaaattttctagcctatacatacctatacctaaatccacctgaacttattgtttcctatcccatactatgtgcttccattcgtctagcccatattccccacacttgtgctagtccccttactagcaggatgctcctttcttcatctcctattccactgacaaaatcccacccaactctcagagaacatgaaaaagtcatttcttaatgtacttcctcttaaagggatatatatcttaaattttttgaacctcctagagtagtatttttaactctattaaggcatttaacattctgcataggaaattccatctcctctcttctgtgtatctcctctgcaataacaaatgtaatttaattagcattttccttctttgagccatgcattggttcacttagacactagcgacacaaataaaaggaataagagagtttaataattatgtctagactctaaggttcttgagggcagggactttgtataatacatttgcgtttgtttccaatgcagcatctaatgctgtgctttgaaaaaagtcagtaattagtatatacttgtggagctgaattagtttccaacaggtacaaagcattattcttggaagaaaacatttgctaccaaaaaaggatttgtcttaactgggaaaacagataaccacatctttaaatagctttcagagatgaagatgaaaattagattaaccactggttataccatccagaatgaagatcctaatagtgtcagaacacttctcactatgctattaacttgcaagcaggccagcctgcttcaaacaataaactaccatatgcctgaagcttcaatattgcaatttggttcaggtaaagatagttattgcttcacatctgtttctggtactgtcttgggagtttatataggacactttaagttgtcaagatttaaataagtatctattcaatatatctgggagacagctacttcctgtttgacctaatcacatccacaaagtgtttactctcatcatgcttacgtttcctcctttcctggaaagcagaacggaaaggcagagtaaagtttttttaaagatggcataaggaataaaaagacatgaaaatggtcaaaagcattatgcaaaaacaaaacaattcctctcaattgtatttattaataacaatgaaaaaaattaatcagcacaactggggtcactgctaaaagaccaaaccaagcccctgtgcctggcacctgccaggctaagtgctcctttggttgagcccaactcctcccacagtgacacacttctcctccaggaaaaaaactcagcagggcaggcaacaatcactctgtccattactgaaagtcaacttagcagcccaaggaccagattaagggtcagttgcagagaaagagggagagaagtgcactctctttgagtaggagaaacagaaacctaaaaatcaagaccctggaatctgtatttctagagagaactatcaccataagatggttgcaatattccaataggatgagaaaaggactaggcaggcctttttcatggcattcagcctcagactaagatataacacttctagggccaaatatttgaggtgctctgaaacagctcaacctgtgaaaattttatcagataaatttgtaattgagaatattctaaatgaaataaaaccctgctggtgtaccggaatgggaacaaattggttccaaactcagatcaactgtttaaatcccagttctgcctttttcttcctttcattcattccttccttgtctttatatattttttgttcatttactcattctttcaacaaacatttattgggaacatactatacatcaggcactgtgctagaaactccatatacaagtttgaacaaaacagtcatggtctcttccctgacagagcttttagactagtgtagagactacacattaaataaatatacaaatatgtgataaataccaatcattttaagtgctaagaaggcaaaaaagaaatcagaatttagagaaaccaactgggtattgcaggggaggaagctatcttacaatagagttgaaaggattaaaaacaacatgtaagtgcttagcacaatgtctagcacatacaggttcttaacacaagcagcaactgttttttggttaacttctctatgccaagtatagaccctcgactgtctattctctcccattctttccccaccacagaaacttggaagtgttggagcactgttaggtactattgtgggagaggtgcaggctgttccctctagatatttcaaattgcttcacagctggccattctaacagtcttatatataatcataacttcaaccaatccacaaccttctttcaggcatatttgagttttatcttttgtgtagtatccttgagataatttataaactttacctttttggttcagttggatatttatcccttttatccctaagttaaattacactcaacaaatgaccaacatcaacaattgagatgaactcattctgtgtggaagaaatgccagagaaacacaactagggacatccctgatggttataactttatggttatacaggatatctcactgtaagagatctttctaaaaaatttaaaattctccttttaagatcaagattatttctctatcctgttcttagagagcaaatattcagtaagccttaaaatttcacaaatcccaattcaagtttagtaaactgctggcccaataaagactataatttctttctaattatcctatcttcatcacccccaaaatagtaaaactaattccaacagttccttagtttctttgattgcccaaagtggactagagtgcctttagtttatataagaaacccaatcagtactcttcagttcttaatcaaaaaggtgaccctgcatacaatttaagatacatgtcttgggtactatcacacaactcagcacatagcatacagactaattagaaacaatctctttctaaatgaaaaaaaaaaggaaggacagaagggaggggagaaaggaaaaggaaggggaagggaaaaaggagaaagaatattcattacactgtaagtcacttgtcagaaaaatgattccaaagagtttcccaacccccaaaactaaaaacatcatataccacattagaaacctaattcacctgattatttgatctatcagatataaagatgcttcttggtcatagttacaatgaatgagaactttctaaaggtctccaatatacaatatcagagtgtaatacatagatgattattttcatacacatctatattaatctttaccgagagaaagcaaaattgttctcattggtttttaccaagtaggcacacatttcctaaaattcctaaagttgtacttagaaggcactgagttgaaataaataaactttacataaatcaggggggaaaaactgtagaactccttttacattggtattgtctgatccgaacaagtatttccacatcttaaaaaagtcctcaaatccattttgtgattctacaaaaatctcttatttcaatcatttactgtttaacttatctctctgcctttttctcctcttcttaattactgcaatgaagtaggaggaacaggtatttcctccatttgttcaaccacattgtctcaaaaactccaaggccctcaaagttttctgacactcaactctcttgtttatacccacacttttcatgtctgactttctcagccttctcccagatattgccatttagttatctgtcctgtgactacaattccagggaaaaactctaactagtcacaaagtcaacataaacagtggcttccacatactgcctctgccaggacaaatctcagaatgttttaatcccttaaaactgccagctgtccaatgagcatacacttactactatgtcagatatcaaaatatgtgagatcaatctcacctttaaaacaatccattctgattaatgattctactatatatatataataatggaaaaaaatacatctggatttcttcattttgttcagtgaaacatcagaatactagtggctgtaattaaaactaagtgataggcttgtcaccagcctgccttagttttaaggaaagaaagaatctatattctgcccaacacaggcatttataggagtggagacttgggttccattaatgctgttgcttaattatctacgatgtcaggataaaaaagggaaaaacaattaactgtaaaacataccttttgttgtgcttgtgtgctccaaaggtataaaatagcccagaggtgaaataaaaatagaaaatctgcttttattaatgaattcattcacttaagtttatatcaaactgtgtgagctgaaaagaaagagaaagagctaactccagtacagtttgtatccaaagaaaactccacccacataaactctctagtaacataacaagttttaagtccttggggtagagaccatctcttcttcttttgtaagcactgtgccaagcctatagtgctaagcaaataataataataacaagcattacatcacatgaacaaacttttttgaataattaaacattaagaatattctcttttgccagttatctataaaaggtgatgttttggaaattattctttttatactgtcattgcctcatgtctttgaatacctccagcaataaatatgtaagtcatactcagagagagaatacacaaaatgctttacctttattggcaatctttaactcacatttttatgctttggagctagcaaaaatttggtgaaattataatcatttttaccaatattacaaaataacataaaatatgaacttgagataaaactatatgctgagagtgacacatttcacttattaatctttataagctgaatagttactaaaatatttctatctaaaaacctgagtaatcaatgacttcactttttcctgaattatagacagactgtatttcacatcttatagatcactgttataaaataaaagcaaaaattgacaaatgtgatctaattaaagagcttctgtgcaacaaaagaaactatcgacagagtaaacagacaatctacagaatgggggaagatttttgaaaactatacatctgataaaggtttaatatccaccatctattaggaacttaaacaaaattacaagaaaaaaaaaaacaaacaactccggccgggcgcggtggctcacgcctgtaatcccagcactttgggaggccgaggcaggcggatcacgaggtcaggagatcgagaccatcccggctaaaacggtgaaaccccgtctctactaaaaatacaaaaaaattagccgggcgtagtggcgggcgcctgtagtcccagctacttgggaggctgaggcaggagaatggcgtgaacccgggaggcggagcttgcagtgagccgagatcccgccactgcactccagcctgggcgacagagcgagactccgtctcaaaaaaaaaaaaaaaaaaaaaaaacaactccatgaaaaagtgggcaaaggacatgaacagacacatctcaaaagaaaacgtacatgtggccaacaatcatatgaaaaaaaagttcaacatcactgatcattagagaaacgcaaatcaaaacaataggataccatcttatatcagtaagaatggctattattaaaaagtcaaaaaataacagatgctggtaactttgtggagaaaaaggaatgcttatacaccgtttggggagtgtaaattagtttaaccattgtggaagacagtgtgacgattcctcaaatacctaaagacagaaataccatgcaacccagcaatcccattactgggtatgtacccaaaggaatataggtcattctattataaagacacatgcatgcatatgttaattgcagcactattcacaatagcaaggacaagaaatcaacctaaatgactatcaacgatagactgaataaataaaatgtggtacatacacactatggaatactatgcagccataaaaagaatgagatcatgtcctttgcaggacatggatggagctggaggccattatcgttggcaaactaatgcagaaacagaaaaccaaataccacatattcttacttaaaagtgagagctaagtgatgagaacacatggacacatagaggggaacaacacacactggggcttatcagagggcagaaggtgggagaaggaagaggatcagaaaaactagctgatggtacttgggttaatacctggaggatgaaataatctgtacaacaaaccctcatgacacaagtttacctatgtaataaaccctgcacatgtacccctgaacttaaaagttaaaaacaaacaaacaaacaaacaaaaagacatgctaaaggttaaataacaacaaaaaagccagctatgcccaattagtgtatttattgacacttcttcacttctttatatgtgagaccaccactaagcttaaataatggctttatttccccttctctacatgcacttagttcctttcaatattaatgaaagctatgtaataatactggaagatgattaagcttatcttcttggttagaaacaagttcagaaagcagctttttagggaaatattcaaatttattagcagctcttagaaaattgcccccaaccaccacattgtttccaatctcaagttaaaaagaagttttctccatcgggcactgaatcactttaatgttgactcttgtgcaactctactccaccttcaaatgtatccagtaaattcaactttaactacagtactataaaaatgtgaaagaactataacagcatcttaaaaaaaagagctgtttgcactatattactttggagaaaaccctaaactgaatactaatgcaaaaatttaatgatagtttgcctagttgccaaaagagttacaataattattttgctataatgtgtaagttgttttgcaggcatctgaaaatactagtgtgtaggattcagagtaagtcctcaaagtgtcattgttcttgtgggtttgtttttcagtatcaataaatcatcaatatatgatcttcactgtaacactgtcctctgattagaagattgccttatgagttctgcttctttaataagtcagcttctttgatcggcacccaacatggatccacctcacaccaattccacattatagtgaatacaggattatgaggtcatggtaaaacattcagacagaatcaatacagttttacttccattttcctttataaactacaaccaaatttttagagttgaaaagtaaaccaagatcaaatttagacatgttgtttgaaattagcgaagatgaaacacttcagtgccagacaaaagccctgactttaagagtaggtttttgccttcctgaaatgcctagctcaggctgtgtatttttatgcctgcagatattggcatgtttcacatttaagattatgacacaccaacttattttgaaattttgaaaatgttccaccgcgcatgtttcaaatgcttcatgactatcactgataattgagcaattaacttgaaattaccaaatgtgctgtggtggcacaatatgtagtaagcaacatggaagaataaagaacagaggaacttggtacagcgaaaaaaaaaaaagtaataaagtgtaaaataggccataataataataatagtaactgagtaaattttaatggtcccaggtctcagtggtttaatagtgccagtaaaatggtttaatgaaacaagtccagagtattaacaaactttttagagcagtttgttctggtgctacaaaaacgaagcctctttctaactggccttgtgcaatattcagggactggtccaaaaagtaagtgcaggagtttcattagacaacaagcacaaaacaattaggttaaaaactctgacagattcttaagaaatacaagcttgcaaaaaagagatgtaaggtcttactttaaatgttaagacagacaaagcaaaaattctagggttaaagatgacctcaaaaagtcatcaagctattgtgaacctatttgcaaatcaaaaattaagacacatggcttaacatgaagactgaaagataaaactcagctatactggaaaaaccagaattcctcttcactgtttattccattaaggtctccaacaatgggcttttctgactaaaaccatagtatgacaataaagagtagcatttttgtccttaaacacagtcagtgaagcaaatttcatacacctaaatcctaccttattttggtggcaggccattttaaaggtttgcaagaaaaaacagtaattcagaaagtcagagagggaaaaaaagattcaaaactacagcaaataaaaagcactattaaaaatatttttttctcaaaattccatcaatacagctccaaaacaccactaagagattaaaaataggccaggctgtcctttcaggtataaattagaaacagaaagtagagagggcaaaaagaacaagtatctaagggacctagtatataaaatttaaaagcttaaaatgtaatgggtatacacattcagattagcaaactcctttcaattaaagtagatttctggccacatttcacaaatgtatagtagctgtgtgtattaatgtagatacttcaaatgtcagtatatctctaattaacatgagcacacaactgtaaaactgagaaggcacaattttaaattccttacattcccagcattaatgctttcatggggcagctcccgttgtcatggaaaatggcattcaagccctatttgtggattttcacagctcatcttttttatttacctgctctatgtcaagattagcctggaataatattttttaaagataacgcacttagacctacttgtccttaaaatcacagatattctcactgagggatctttggtctgggctatgctcagttttaaacagatttctttccattttaaaatgccacaaagacatgattttgtgatttttgtttgtttgcttccctaaaaatctatgtaattcaaaaaatttcagctgaagcatgacatgtggcaattttggaatagaggagtaggaaaatatcagggaggaccaaatggtccaggaacctgaggaaatgaagtcagtggtagaagcgtctctacaatctcctccccgacttagtctatctcaaaatttcaaaaatatttatacagcaaccaagtgaagactgagatagtgatcaaaaacaaaagagagctgaaattctctctgaaagaggaaagcacggtgttgtgaaaggagcactaaatttataccatgaattcaaggtttgaatcctgctactctgcaaaaataaagataattcctactcattccacagagttttcatgaaattcagccaattaaatgtctgcagaatcaagtgttatactatcttaatattctgttggtattattattgcctcaagcctagagttaggcaataatcactttttgtaccacacaataaaatccttgtcagaaacatcaggaaaaagattgctattagagaccatgagtcaagatagaattttttaaaggaattcattatcaaattactaaaaagacttgggtaacctgaaaaagcagggtagctaataaactatgtccgattttttttttgttttttttttaacccatcatttactgctctggtaaaattaaacggtcagaattacataattatttttcattagagataagaaaaaatcaaatgtgagataagaacatgcaaaataaggcaatcttccacaatgcttactttaggaaaagaaaaaaaggaagttttacttttttaagagaaaaaaaacactagaataagatgcagcttctgaagagacagccattttccttcacagtgttttcctcttccggcctaggtagttgatttgagtagctaagattccagtcagttctcacacacttttggtgtagcccattcattatggatgtgcaaaacaatatcccaccttccttatctcacagacagacttgcacaccttactaagaaaccttcccatggccatgaggtataactttctgccttagatcatgtagcaaataagcagttgtaggacatggaaattaaggttcataaaagaagtaattgtcactgaacccatttgcctgttcttaggcctgactagacaaatatttctatcgttttagaagcctcatctttcagtctaagtggttgaacagtttccacaacaaatgagagaactagaaactcaggaattttggatgccatgttaatttcatctgacttatcttagtcatagtatccggctatatttctttaaccaaaaggttctgcagtcaggagacagccctagcaaaacctgagatcactgaccaaaggaacaccaaagcccatgccctaaacaagcatatgtaaattctcaagaccagaaaataattgctttaagcctgtatgactagcatgacatgtgcctaagtggccagacaaaatctgactaaaagatgtttggttttttgtttgtttgtttgaagtggaactccagaaataaccatacagaaacgacatcaacagtgccccttctaattttagcctttccctttgttaagtcaaaagaaagtgatcagctacttggatcaccaccattcaaagttagtctaaatgtgtcttgatggagggaataaagtgaagaattcaggaaaaagatcctttgggtgataagaaatgtaaactatattttaatgaaggccatcttggtttgaaatgctggtaattatatttgtcacattaaaaactttactcatcctgaaaacttactaaagcgaatgactaaataatatgaaagaagagagaaaggaggtaaaaaagagacaaagcaactaagataagatttggacagctcagaattatttcccttcactcagatttccagtagaataagttcggttccttagaatcctgttttcacaaagagcccttcaaagatactttatatttctttctccatcttctttgcttcctaatcctcaccacaataccttgcataaattaaaggcttatgtttaatccaaatgaccccacagtttatataattttgtgctttacataagacttacatctaaaaataataaaatgtaaattgatagagtttcataaaataacaatttattattaaaacattaaaaatacataaaatgtattaaactatattaaacatgaacatctatttttttaagctggttcaaaatgcctatcctaatcaatactattattaaaagaaaggtaaagctggtattaaataaattttcaatagctctgcttaaatagagaatcacttaaactctaatttataacattacttatttcaaataatttcctagaagtatattctttaaaattcctttatagcagtacactaacaaagaaaaagtttcctgtgtctttgctgttatcaaatgtaaaaaagccccttaaataccaacagtttacaacaatgtatacatacacatatattttaaatgcaagttacttaaatgtaggtttacatccacagagacatttttaatacctgctacatactctatagcacttctatataatatatattgattaatttcaagtactttaataggtttttaaagttcattcaatttttttcttgaaatttgccttctttatttataaaaagtacctttgttctccaaaatattatttaaaatataatggtgttttgcagatggggaagagtatagtatgccttagtataggcgtgccttgaagatattgcaggtttggtccagaccactgcaataaagcaaatgttgcgataaagcaaatcacgcaaacgttttggtttcccagtgcatataagttatgttgacactatactgtactctggtaagtgtacaatggcatgaagtctaagaaacaatgtatatacctcaattaaaaatactttattgctaaaaaatcataatgatcatttgagccttcagcaagataatctttttgatgggtggaggctcttgttttgatgttgatggctgctgactggtcagggtggtagttgctgaaggttggagtggctgtgggctgtgacaattcctttttttttttttttttgagatggaatcttgctctgtcgcccaggttggagtgcagtggcatgatcttggctcactgcaacctccgcctcctgggttcaagcaattcttctgcctcagcctcctgagtagctgggactacaggcatgcaccaccacgcctggctattttttgtatttttagtagagatggagtttcaccatgttggccaggctggcctcgaactcctgaccttgtgatccaactgtggcaatttcttaaaataagacaatgaagtttgcctcattgactctttctttacaaaatatttttctgttacatacaatgctgtttgatagcattttacccacagcagaacatcattcaaagttgggtcaatcctctcaaactctgctgctgctttatcaactacatttatgtaatattctaaatcctttgttgtcatttaaacaatgtttacagcatctttcaccagggtagtttccaactcaagaaagtactttctttgttcattttgaagaagcaattcctcatcttctcaagttgtatcatgagactgcagcaattcagtcacatctttaggctccacttctacttctaattccacttctcttgctatttctactacatctgcagttacctcctccaatgaagtcttgatcccttcaaagtcatccatgagggttgaaataaatttctttcaaattcctcttaatattgctatttttacttacccccatgaatcacaaacattcttaatggtatctagaatggtgactccttcctagaaagttttcaatttacgttgcccagatcaattagcagaattactatgtatggcaactacagccttacaaaatgtacttctgaaataataagacttgaaagttgaaattactccttgatccatggcctacagaatggatgctctgttagcaagcatgaagacaacaataatctccatgtacatctccatctgagctcttgatggctaggtgcattatcaatgagaaataacatctctaagggaatctttttttctgagtagtatgtctcaacagtgggcttaaaatactcagtaaaccatgctataaacaagtgtgctgtcactcaggcttccttattccatttgtagagcacaggcagagttaattcctaaaggccctaagattttcagaatagtaaataagcattggcttcgacttaaattcaccagcagcattagcctctaacaaaagagtccacttgtcctttgaagccaggcgctgacttttcctctctggccatcaaagtcctagatagcatcttcttcccatataaggctgtttcatctacactgaaagtctgtggtttgatgtagtcaccttcatcaatggtcttacctagatcttctggataacttgctgcagcttctccatcagcactggctgtgtcaccttcacttttatgttaaggagactgctattttccttaaaccttgtgaaccaatctctgctagcttcaaactttcttctgcagcttcctcccttctctcagccttcacaaaaattgaagagagttagggccttgctccggattatgctttggcttaagggaatgttgtggctcatttggtcttctatccagactgctcaaactttctccatatcagcaataaggctattttgctttcttatcattcataattaactggagtagcactttgcatttccctcaagaactttccctttgcattcacaacttggctaactggtacaagaggcctagcttttgacctgtctcagctttcaacatgcctttctcacaaagttgtcattcgtagctgttgatttaatgtgagacttttatgtgctgctcttcctttcatttgaacacttagaagtcattgtagggttattaattggcccaatttcaatattgttgtgcctcagagaacagggtggctcaaggagagggagagggatggaagaacagccagttggtggaacaatcagaatacacacaatacacacaagtttgccaccttatttgggcttgtttggtgcggccccataataattacaatagtaacatcaagatcactaattatagatcgtcataacagacataataataatgagacagtttgaaatattgtgagaattatgaaaatgtaacagagagacatgaagtgagcacatgctgttggaaaaatggtgccgatagacttgcccaatgcagggttgccataaacctctaatttgcttaaaaaaaaatctgcaaagcacaataaaacaaagtgcaataaaacgaggtatgcctgtacattatctcctcatgtgctgacagctctttgaattctacattgtctcacatcttctctatgggcataggcacatagcacttttcaagtacagacaaccagaagactatcagaagttatcagtgtaaattattcacgtgtatatagactagactctttaagataactcattcctacaattgagccctattctcaaagagtaagatagttattctttaaacttattataatgggccctgcattgtgttatttcactggaaattacaacaaattgaggcttctttaccagctggtacttttctctatgctcctcctaagaaaacacttatcaaaaaataataattacaaaacaattgcaaaaaaactaataaaaattcacacgcactaggagttaagaacttgtttacaaactgtaactgtttcattacacaatgagaaaagtaaagataaaccaatacttacaaatatgcacaaaaaatatcagccccagcacccagaaatcactggtaaattgcctttgaattcatgaaagtgacctgaaaatttaatagaaaatgaaataaaaaaggataagtaaattgcatttatatgctttattaaagaagtatactttctggctacaaatcatacaatttttaactcatgcagttgtccccatctactttaacaactttttccaaaatgataatgccaaaagaaacaattatttcatggttctacatctaagaatgccacatttccatccaatattgctcttttaaaaaaatcggtaataaagtaggtgataaaaatacaaataagtaagaacaaaagggaaaaaatttttaagagaaagaaagaaacaggcttataatttatatttgaaaaacatttaatttatgtctgcaagttgaaatgaattagcttcacagagaatatcttaaatgtgcctgacaggaataccttgtaggtagaattaataagaaagaatgcagtgtttgttctacctaaggcgtggaacccataagatgcttaggctatatacaatgcattctgtataagccataattcaatccaaaattgttttgctcacatatactttagttctggctgaagaggtaacagatgcaactcaaacacacagagctagccttatacaaatttttaacatacaaagagtcattttatgcctctacatgcctatgattttctctatccaggacccccatgcattaaggtggtttggtagtttatttttattgtttggtctaaatacagcatatttttagttccattaaaacaaagaaactttgttacagaggctgtattctttcaaaaatgtgagcatggctgtgagtagtagtcaactaaaaataataatagagcttgggttcctaaattaggtcagaaactttcctaggctctggggactggcttgattcaatctgcagtttttaaatatagccagcaaatatctaggttagttacagctaactagatttaaataaaatccttctgaaaaacaatggatcttgatcaacatcatttgtaggaaccactgcacccaacttgcaattatagcacaaatgaccttaatagattaggtataggcatctgaaattaagatgaatatgaaataaatatctaactcagccctcttcaacccctaaaatatgcttttacctaaatgatccaggtaatttattctattttctagtcaagatttatagataatagagccaggtgcagtggctcacgcctgtaatcccaacagtttgggaggctgaggcgagtggattgcttgagtccaggagttcaagaccagcctaggcaacatctctaaaaaatctctaaaaaaagtttttttttaaatctttttaaagattgatagatgataaaggtgtgggcatttggacagctttaagcatcaacagctaacatacccattagacttcttcactagaccttcttgtccttgtaggaaatggtgcctcagggcttctccagtttcaccagtttccagcaactctaacgcctacttccacagtgcaagaagtacaggacagtctggctagctctgtcattaattgttggtattatacccttttcttcctcattgcctctgctgtttagggatctgggagagtaattttatctgggacaccagacaagcctacctggacacactgtgtgtattatccaaaaccatcaaagagtactggttctgattcaaaccatcctcacgtgctatcccccgctgagttataaattataatttccttataaagaagttacccacaaaataaattttatagcaaaatgctgtatatccaaaagtctaaattctagaagaatccgaaagagtttttagtacttatacattttaaaataccacaccttgtttttctggcaactacttttttaaaagcattaattggaattatgcaagatacatgatacatcctattccttcacttccacataaagaatggggagctaaaagaaaatgtgaccagaaaatattgtggttagcatagatttaattttttaatcaatgaactatcttgaattaagatctctaactctagaaatatttttaattttggaacaagtcagattccagacatttagaacaaataatattttcacatacaccaatacaaagtcaataaatcttattcatcatatcagtccagtcgtgctacatatgttaaaagcaactgtgaatctcattatcaatggatttgcactattggtgaaatttacagcaaagaattaaaaaataataagttcctatggtcaaagagttcatcattatataattttaaaaatgactttaatgcatagttctgcatgcagttaactgaaggctaaacaagcaacattttatgaggggcaaagagttaagaattaatatatacacaacttgaaataggtacctttttaagaactagaaaagtttagtcttaaaaagacatttccaaaaacaaaagcagtcactatggtcctgatggcagcacaaatgtgaaaagatagagaaggaaatgccagagcaaatcattacgtgttctggaaaatctcaatctgtttggtaaaatgaatcctcagaacgcctaatcacccatggattgttccagttctctatttgctcatttatacattcagcgaagagtgaccatgggttaaagatcacactggacagtaagaacacaaaaatttaaattaaaaaaaataatggcctttcccatcaaggatttcaaacaatcaataatccaacctgggtcacagtctattacacatctgaccatggtggtaatttgttccataatatttagtcatcaagtctttgatatattcttaatgtactaaataaaaaatgcattgctacaaatacttcaatataacaatgcacaaggggccaagaggggtggctcatgcctgtaatcccaacactttgggaggctgaggcaggcggatcacttgaggccaggagtttgataccagcctggccaacatggcgaaaccctatttctactaagaatacaaaaatcagccgggtgtggtggtgcacacctgtaatcccagctactcaggaggctgagacatgagaatcacttgaacctgggaggcggaggttacagtgagccaagattgcgttactgcactccaacccgggcaacggagtgagactctgtcttaaaaaaaaaaaaaaaagaacaagggatacaaagaagaaatgtacaaatgaagaaatgcaaatgtccaataatataaaaatgtatacattaaaaattaggaacctcccaaatagccaaagaaatgtaaataaaatgttttcactcataatattggcaaaacgttttataaactggacaaaaactggtattggtgagagtgtggaaaaataagcactttcatatactattgatgggattataaatgtatgacttttctgaatggcacttttacaataagttttaaaacttttactgtctatatcctttgagatttcaacgctactttcaaaaattatcttaaagagctcattataaatatgataaaagatacatttaatatgtatgttcactacagttttttataatagccaaaattaggaataacctattgattgaataagtaaattgtgctacatacatataacactactctgtaattattaaaaatcattatataaatctatatttattgacaaaaaagatggccacaatatattgttgaataaaaaatatgtgtataataaaagcccatcaatttatagaatatcaaatacttatgtgaaaatcaaatatatatgcatgtataagtttcacaaaatataatttaacaaaaatgttaacattgggcagggtgccataggttctttttactttattacccttatggtttgatattatttagatttttttatacttagcatgtctaatgtatgccaaaatgaggaagatatttctaaaattcagtatatcacttagacattcaaaagaaatgacccagatctaggataacttgctattagtctgggagcaaaagccaaatattaatattagtttaaaaaaccctcaaaattacagggcaacttcaaatgagtatcttaacatcaaatgaagaaaccataaacattttcacaaaagcatgtcccactctaccaaaaataggtaatagatcaaaggtaaatagcaaataaaaacattgccacctccctgtataattagactttaaaagctttcaagctacatttttaaatcctgcttaaaagtctgtctttaagccacacccatttctgtttttagtaaccccccccccaccttctttttattatgtgagttagcaagaaagttcaagtatcaaatgggtggttggattaaatgaccttacagccctgagactcaatgattctaaggtattatttaaagaactaaagtgcttccaaaacacctgtaacaaattttgtccacttttacattaaatcatagcactgcatgattaaaactgaagtcaagaattaaataactttttaaaatttattgatgcattgattttactaatattatacatagtgagccactgaattaaaacaactgtcttcaacgcatttatcttctcaactaacttttaggaaaatatcgatgcctggtcttttatatatcagaataaaaattacacattaaaaatatcctgtatgcaaattcaagtgggttttgcaggagatgtgattgttgcattaaaactattgctatttcctccaaagctccatcaatttaaaaatttcaattcttcactgttattatcactttttttgcttgcagctttactagattaaacccatgtttattgaactccataatgcttagttttctttttccttaataatcatattaaattatgcagaatttgaattaactataaataataaaatgtgaaatttgactttcagtaggactgacattaagctaatgtccagtattttttttaaatgcagttgttaataatttaaaacatcacagtactgaatagaaaattatgtcttctaatgcaaaaggttagagtatttgtgaggtatcaaggaagacaacttaagatgctacctagtccaccactctgctgttctggaagaacttccttcctcaaagaaataggaatttctcctattcttaaagatctccaaaggtagttattattgaagctacctcataatagcctattcatgtattccatgctgctcaacctatatctcttcaatattattttggtattgagggccacacttagaagggacattgacaaagcattcagaggagaatggctaggaaactttatggaaaccatgttacaatagcatggttgcatgttcaatgatggtggttggaatgaacttggagatcattgagtccagtggttctcagactctttggtctcaggactcccttacagtcctaaaaattattgagggtcacaaagagctattgttacatttatcaatacttactatattagaaactaaaactttaaagtttttaaagagttattttaaataacaataataaacctattacatagtattataaagtattttatgaaatacaagcatattttccaaaataaaaaaaagagagagaaaactaacattgctttacatctttgcaaatctctcaaatgtctggtttagaaaaagacagctagattatcataggtgctactgcattcaatctgttgtgatatgttggtttggtggaagtatgtgaaaagtatccattttcacacagataggtagttagaaagaggcagaatgttttaatagccttttcaaataattgtggctattcttttatattatatcaaaatttgacaagtaatcatttctcaaaagttaattgcaatatggaatctaaaaattgaatatcaataaactttttgtattccattaccgtaaaatcaaatcgcctttaaatggatcttttagccatgcatgactttgtaacatcatacattagttcatttaagaaacattggctcactgagtttaaaacattgacatattttattatgcaatattgttaaaaccacgtttcttaatatccaccaccctatcttatcagaaacatttttaagtactgggaagcgatcatgattgtggtggtgggtaaaagctttgcaaactactaatttgctcttggaagctcaaattttattgacaaaaaagtgtcacttgttttctacaaaataggcaggctcactttgttcatttttgagaatatgtctgccaagtttttaagtctaaataaccattgtgtgtttgttagttgttctttcaagtaaaaaatggtgttctttgaaaaaagtagttagttcaactcaattataagtgattttcctcaagataaccatcatacttgagtatgtagtgtaagtgccttatacatacttcacatttcagcacacagagtattaaagaagggtcaagagttaataaaattaaaatttttactgtttcatctacaatgcttttaagtgaaactgcctttttgtttgtttgtttgtttgtttcgtgagtggtaataataaagaattcaatgactactaatatcatttggtgccactgtcttaatgtgtgctaaggcaccagcagttttaacccaaaattgctatgcatcctcaatgcaaatgtcaatacagtgaaaaaagcaactagcaatttcccattacgatgaaaatagttttgacaacacaccctgtgaaagggtctcagggatctccagtgtccacagaccacattttgataaccactgatctactctgatactccattttgcagccaaggaaattaccttagttttttcaagcatacaaataagaggcaattatacctagcacagcaagtataatatagtaaatgctgattaaaattagtttctctttcctccttcccaaagaaagaacaatacttgtgggtggaaattacaaagtggtaggttttagttcagtccaagataaatcttttttttttcaagttcacaaaagcactttttatttgaggcaaagagaagtcttgctgaaaggattacagttacaagcagttaaaactcaactgttagtggcactactttaacctggtagattttgcttccctttggtcagaaaagggtattcaggttgtactttccccagcagggcaaaaagaagggcaaagcaaactggaagagacctctattctactgacagggctcctcagatccaacatcaagctggacacaccctcgctggccactctacagtttgctgtcccactgctgagtgacacaggctatactacatttgcaatgaaaaaaatgaggcaggaaacacaggtataggtcacttagggacaagcaggcaaccacagcttcaaaactcttcatggaaggggtaatccttgtgggaggcacagctcaccaaggcacagaccctccagttcctgttgtagttgagtgaggtggtcatatcctggctgctcagttcaaagttaaagaccttaacgttctcagcaaatgcattctggtgtcacagacttggggatcaccaccaagttcctctgcatggggagccagatcaggacctgggctgtagttttattgtgcttggctgtgatcaccttgatcctgggatcctccaggaggcaaggtcctcgggcttggcccagggcctgtcgggagagccgagggggctgtaggcagtcaccacaatgcctttggacttaacttctcctgaatgaggtacaggtgacactcaatctggttaactgcaggcttatcctttaagccaggtttatttaagatcctctccacctggaaatggttgaagttggagatgccaatagctttcaccagcccttcatccaccagctcctccatggctgcccatgtgtccagaatgttggtgtcactgggaaccacattgcccgactcatccaatggggaaaattccctcccaggcttaaagccagttggccagtgaataaggtaaggatccaggtagtccagcttcatgtcactaagcgtcttctggcaggctcctttaaccaggcccttctcatggtacatgcaccacagcttactgacaatgaagagctcctcgcacttcaccacctgctccctgagcttctcctgaatggccacctccacctcattctcattctggtacacatgggcacagtcgagatggcagtacctgacatcaatggccaccttcacagcctcagtcacctggcgtggagggggcttccaggtgcccagccccaggatggacatcctggcaccgttgctgagcacgaagtggctggccatggctgctgcgctccccagactcccacccagaaccgtgcctagttcagtccaagataaatcttttaaagcaatgaaataagttgcatcatcaaatagaagttgtcaaagttgagactgcatgactctttaccaagaatgttgtggaaagaattcttatagagttgaacgttgtaccaaaacttagctgattatacaatcacctaaaaagcttttataaagttcaaatttctgggccccactctagacctcctaaaccaaaatctccttgagtggaccaggagtttacatttttttaaaatgtatactattcacacccactaggaagaatacctttacactttcatgtaacataccctaagcctactttaataaattatatggtcaggatcaagacatttctgggtcaagagaggaggaattattgtggcatttccttaggcccaccagttcacctccgccaacatgtgtaactgaattgtaaatcagagataggattgcataaatttgacacatttttacaactgccaacactttactgctctcctgaaagaataattcaataagagctatctatgaacaaaggtggtcagcataaaaatagtgtctacacaaaacaaaacaaaaaaaatgagggccaggtgcagtgattcacacctgttatcccaccactttgggatgccaaagtgggagggtcgtttaaggtgaggagttcaaaaccggcctggacaacaaagtgagacccccgtctctacaaaagaaatttaaaaattagccaggctgccaggtgcagtggcttacacctgtaatcccagcactttgggaggccagggtgggcaagtcatgaggtcaggagtttgagaccagcctggtcaacatggtgaaaccctgtctctactaaagatacaaaaaataagctgggcatggtggcacgtggctataatcccagctactcgggaggctgaggcagaagaatcgcttgaaccctggaggcagaggttgcagtgagccgagatcttgccactgcactccagcctgggtgatagggcaaggctcggtctcaaaaaaaaaaaaaattagccaggcatggtggcacacacctgtagtcccagctaccgaggaggctgaggcaggaagaccacttgagcacaggaggttggggctgcagtgaattatgatcacgccactgcattctatcctgggcaacagagtgagatactgtctcagaaaagggaagggaagaaaagggaaggggaggggaggggaggggagaggaggggaggggaggggaggggaggggaggggaggggaggggaggggaggggaggggaaggaagggaatatttagaagacctcctgtcattactttataaaggtattttacaaaggcagcttatcattatgaaccaagatcaaaatatagaccacaaacttccaaaaactatttacagaattaccatgtgacttaatccatggtacagaattaccatgtgacttaatacaaaatttgtattttgacgtcttcactacagaaaaattccacatacttcataaacagaaggcagcaagacaacctgaccaaaatcaaataaaaatttggcagtgggtaaaaaagaatatattttgtaacttttcacttcataatcttgttctcctttattccttcatgccccttgcttttcttatcaaaatacacttctttgaaataacacctattattgtcttttttaagatcttttttttcttatagcctgtctgatttcagagataacaacttaataatagtttttaaaaaggcaaagagggtcctgtatgagtaggactggagaaaaaaagtcattatcaaaacataatccacagactacctatattagaaatgcctagagtgcttattaaaataaaaaaattgtggctgggtgcggtggctcacgcctgtaatcccaacaccttgggaggccaaggtgggcgaatcacttgaggtcagaagtttgagaccagcctggccaacatggtgaaaccccatctctactaaaaatacaaagattggccgagcatgatagtcccggctactcaggaggctgaggcagaagaatcacttgaacctgggaggcagaggcagcagtgaaccaagattgcgccactgcactctggcctgggtgacagagcgagactccatctcaaaattaaatgtgcacatgtaccctaaaacttaaagtataataataataaaataaaaatttaaaaaaagaaaataattttaaagattattagagctccacacaaaccaatcaattctatgatactgagaattggcccatgaatctaattttaagcattgtcctcaggtaattcctagcacactaaaattcaaaaactcccgggctaaagagtaactgtgctaaatgtgggcatgctcacaaaaacttgtatggaaaaatgaaaattttgtaactctgtaaaatgtcttattttacagaaaagattctcaatgattttggagtttctgttttttaacaataaaataatgattttttaaaatataaggaggtattagaaactagacatggaatttagctaaaaaattaagtcttagttattgcagggtgctttttttaaaaatctgagataaagatacaagcaagtcttcagcaattcaattaatatttctgagagcccacaggatgaatggcatgaataggaatttctagggatataggacaacaaagcataatcccagacctccaggaatgaccatttggattcattgtaagatagatgccatagttagaagagtcttgcatttgcagtgcactatcatatccagaaagaggagaggattcctatccttgctgagttttctcttcctgagttctgctcacaaaatggagtaacagtagagtggcagagatttaaaaagcaatcatttaacaaaatcttgcaaataaattctaatttttaagtccatacctctttttaatcagcgtattttgtatagagcagacgtatagaaaaaactaaggcagggccattatttgtacttgttctagataattaaatcaagataaatttaaaggcagctaaagatggtcaattttaatcctcattttttaaaagtcttcttgttaccactctcagtaccacgccctcttaaccacaaataatgacttcagtaatggagctctgtaatttaaaagtatcaggcaaataacagcaagtaacttagatgagttgacaccgcctgttgtgcaaatatgtacttagactactataaaaataacaactgcattatcaactggatacagaccagaacaacttatgggaatacagagagtcaacatagtctcaacttgcatgtatgtggcactttacatttttcaagcatttctaaattcacggtagaaattaaaaggaagagagatgctgaaacaaaagaaaaataaagatttgataactatgggctaattatctaagagtcccaattcctagagtaaatcatccttactcatcacttactggatgtttactctgtgccaggcactgtgttaagccctgagaaaacaaaaatgaatgcagtagagttggtgacttcaaggagttcacagcctagtaaagaagacaaataattacagctttgcatgaaatgtgtaaagagaagaaagcagattgtaaaactatataatctcactttctaaaataaaaaaaaatacttttaaagatgaggatgttaacatttacctcccaaagtttttgtggggatttgatatatgaaaatgcttcctagatggggtatgccttccataaatgtatttccctttttgctttttccctaagactcagatgaaatgagctcaagtcacatcttaggtgatgtggtggctagtatagtcatccactttttaaagaggaatgccttaagggtacaagaccctacagttgtgactttagtaatgctaccacattatcacacctaacaaataaacactgtagacccactaggagcttagttgcacactacaggttagtccttctcaaccttaccttaggtcttttgctcactctcaaaaacaaagaaacaaagaggatcacgtggagagatcctgcttatcattttactgtatcttcttcataacaatttgaagattccactttaaagtccagacaagatctggcctagcctcagaggttgcctcacattctaagtaaaaatatcagggatagcacagtgaaatgtgcccaagtttacaggcaaggaaacagacatacaactcacttaggaccacatgacaagttgctgacagagctttcattttaagtcagagttttccatcactaggtacatgatgtaaagccaaaaaggggggataaaaattatattcacacactttttaaaaaataataaaagactatgttcttaggaaaaggactgagaggaataagctgttaacaaaggctgccattgggcatgggacaataggtaaacactttccatttttcacatttttctaaatttccttaatgctgaacatttgaaattggaaaaaataaattaagcaaaaaaaagtatgcagttctactattttatacagagttcacacttgcaaaggtcacaatcttcagcaacattcagagtattttctaaattgtcattaacatgcaagtaaatcttctaattaataatgtgagttctatatcctacatccaaaaataagggaaagtttaaaatacagcccactcactaggcataatattatgtcattatgtggttattaaaacttttatttggaatcctagacaacagcatgaggaaacatttatggtatgtatctactgtattatataatagacatagtcaatagagttatctaactatctttaaatcagcaatattcctctgaaagtatggtctgagatagattaactactttttccttgataaataacttcaatttccttatctataaaatgcaacacagattcattgctaaaattgaatgagataacatgtaaagcaattagtacagtaccctggcacttaacaggtatacttaacatagctaacctcttagagtaacaatggcaaagtatgagttttttaactttcttaactttttgttccattacttcacactctaccaaaacaacaggaaccagaaggcagtctagtatactgagaaagtgaaggctaggaggcagatctagcttcaaaccctggttctgacatttgctagatatgtaaccatgggcaattatttaatttctctgcaccttagtttcctcatttgtaaaataaacacaatctcatctcacctaccttaaaagatttttaggataataaaatgagattatctacataaaatatctagcaacatattgagcccacaaagtaataagtgttcaataatttttggcaattattagcaggaaaataattgccaaattttctgtaaaaagccagatagtaaacaatttaagctttgatagccatatggtctctctactcaactctgccatcatagagcaaaagcaattatagaaattacatatataagtgggcatagctgtattccaataaaattttatttacaagaacaggtagtgtgccagattgggctcctttgatatagtttgcttaaccctgctttaatagactccccaactggagatatctaaatagctctcttatctatgaccccctaggtatactcctttaataatcatatatatattttagatcactattttgcaaagtgtgttctatataccacttgtttcctgagatattaatatatactatgccttgataaaattctatgttcacataagtttagaaagttctgagttaaatagattttagttttggtgcaagcactaaccaaaagaaaactataatatcagacaaaaaagggttaaaggcaaagagtattattagagataaagataatagtaacagtaatagtaatgattaaaaagtcaattcatcaataagatataacagttctaactttatataaacttaatgccatattctcaaaatatttagctaagcttgccagaagtataagagaagtccataactgaaagtaaaaattttaaaatattctctggataaatgataaaataagtagacttttaaaggcagaaaaatataaaagacttaattaatatcatcaacaaatttgacctaattgacatatttataatggtacacccaacaactgcaacaagtgcacaaaaaacagtatttttaagcaaacatcataccatgattcttattaataaaatgtcaacagcattttctttgagatacagaatgcaacaaagatgcccactacttctattttcaacattgcattggaagtattagacagtacaattagacaagaaaaatacatgcaaaatataaaaatttaaaagaagaaatcaaattgtcagaatttgtagatgatatgattatatagaaagaaaattcaaaagaacctacagatgaagaattactattaacaaatgggcttggcaattttgttttatgcaagagcattgtacaaaaactatatattgcttttctacatataatcccaggcaaaatgaaatttataaatatcatttatataaaactatcacaaatatcaaatacctaggtaagacttgtaatgaaagatatgcaaggcctcattgcaataaactatgtaacatttttgagaataagttaaggcccagcaagtggacagctacactatgtcatggattggaagactcaaaattataaagaagtcaatctccccaaattaatctggagattcagtgcaattccaatctgaattccaacagtctatgtgtgtgtgtgtgtgtggtgtgcgtgtgtctgtgtgtgtgtgcctaatatagtaagttcattttgaaattcatatgaaaatccaaacatctaagaaaagacaagaaaatcttgagcacaaagaatagacttgatctatcagatatcaagataaactataaagcaacagtaattaatacagagtaactggcacaagaggagaaaaacattcctttggaacagactagagagcacagaaaaaggaataaaaactaagcaggtatatgttttagacatctatatgaaaaaacaaaataaaacttgctctctatctcatatcatacaatgcaaagatcagttccaggtagtctatgggtctaaattaaaaaggtaaaacaatgactagagattccgaacctgcgatcaataaagtactaggggttctatggaaggccttcaaaggttccatgaacaccttaaagttatataaaatgatttgtatgtttctggagaaattacccatatctttcatcaccttctcaaaaaaaatacactacctaaaaaagtagcttaagaatgtcctcatgaattcagggtaagaaaagattttttaaacaaaatattgaaagcattacccaaaacgggaaaagtagataaattttatttgattacataaataatattaagcacttctgttcgtcaaaagacaccataagagagtaaaaggcatcttttagtgtggaaaaaaggtatctacaaaatagaaaagatgccattggtgctgctacttaggagttccctggaccagttctgattttagccagagctgcaatggacagtcccatgcaagcgcagactggccttgctagtatctcatctcaagcaatcactgaacattctgccaccttctgcttcatgaccttctctgaagcccacggaaatatgtttagcccagcacaagctcaccttgggagatgggggagtaaacaccactagaagaaactcttaatcagcattgagtaagtgcttcagactctcctccttcaggaaggctttctgtgcccttctcagaggttctaaaagaatccagttcccattgcctatagtgtgaccttaataagaaggaggctttttccttcttccaaacctcactactccctcacttctacttcctcagattatctcccaaaaagctatcagtaccctagtcctcatcaaaaggctctacttttgttggaatccaaactaagactacaaactggtctgtacccagaatgtattaaaacgcctacaaatcaataaaagaagacaagaaattgaatagaaaaatggaaccaaaaacggattcataaaagaggatttctatatggccaataaacatcaaaatgtgcttaacttcactaatatttaaggaactgaaaataaaaattatgagatgtcacttcatatccaccagaatgtttaaactataaagactgataatataaataatgggagaaagtatatgacaacaggaactctcatactctgctagtggaagtgtaaattagaagaatttgtgtaacagcttgacattatctaatatagataaaaataccacatcctatcatccagaaattctacttctaagaatttacccaacaaaggtgcaggcacttgcacaccaagtatacaagaatgcattattcatattagtcccaaactggaaatgtctgtcaacagcggaatgggcaaactgtgatataatcatagaatggaacactataaaacaatgaaaatgagcaaattactgctacacgaaataacaaaaatgtatctcacaaatcttatatgaaatgaaaggatccagaaacaaaaggatatataaagaccatttatataaagtaaagaacagacagatccaacagtgtgttgtataagcatgcatgctctgggggtgaaactataaagaaaagcaagaagtgattatcataaaagaaaggtaatgatgttttttccctttggaggaggaaggggagtagtggttggtataggaagaagaaaggcttccgggtaatataaacattctacttcttaacctgggtggtagttacacagatattcattttatgatacaacttcttcttttgtgcacatttctattttgtatttgggtattatattctataataaaaaggttaaaaacaagtttttctcgaatgcctaatatttaaatataatataagcaatctaattcaaatgataaaaatacaaactaaaacaacgagatgtcagttttcacctgtatggtccagagtatacagaaataagcgttctcaaacattattgttaggagtacaaattgacacagcagctacgaaaggcaatttgataatatttatttaaaatttaaattgaatataagctttaacccataattccatctctagaaatttttcctacgtagacatttgtacaagaacacaaagaaggatatacaagaatattcgctgcaatattgttagtaacaccaaaatattagaaccaatcaaaaagtccattaatgaagacaggttaaatatgttatagtacacccagacactggaatataatgtagtcagttacaagaaatgagaggccaggcactgtggctcatgcctgtatcccagcactttgggaggccgaggtgggcagatcactagaggtcagggagttcaagaccagcctggccaacatggtgaaaccccatctccactaaaaatacaaaattagccaggcatggtggcacatgcctgtagtcccagctactcaggaggctgaggcagcagaatcccttgaatccagaaggcggacgttgcagtgagctgagatcccgccattgcactccagcctgggccacaaagcaaaagtctgtctcaaaataaataaataaaaataaaataaataaaatgaatgagaaaggctacacatcctgatacatatatcctcaatatgtattgtgaaacttttaaaaagcgatatacaaaagcaaatatgtataataaagtaccatttgtgttaaggaaaaacaaacaaagaggcttcaagattgctgactagaggcatctggtaggcctcctacacaaagaagaaccaaaataggaagtcaataatcacccttcaaatcgatcacttaagagagaacactgaaattcaatagggaagtaataggaaatacctaaggcaaggaaggaaagggaaaccaagcagcctgcctggcaatatcagctgggaggttggagagactccccaacatagggaaaatggaagtgaaagaccctcagtggttcatattcccacagtgaactcctgcactcctaatcataggggagcttgtcaaccttggtgggcactgagactaacacaggaagctgccaggagaccacgtaacaatattgctcccaagagggagctcacattggttctcacacactgccccaagtcctaagcaactacagcaagatgccattttgagagcccagcaccctccagactgcatcctgccttggagcccaacagcccctgcatctccacatccctggatccccattgacaccctccacctgcagccagtcactactgctggctgccactgccaaagctgaaacatgagccactggcaacaatcccaccattcctagcagcagggccatagttcatttacaaccatcctaaggacagacaaccctgcccatagccactacctggggccaaagcacatgctccctagccacctgtctatagctgctaccactgaaagcacctccacaatccctaaaagcagggctgcagcacagtcactgctgtcccctctcaaacattctgccatgagcctggaaatcatcctgcccccacctatcaaaactagtgcccatatgtaccaccaagggggacttgggacagatccacctggcagtgctctgccccaccaagtgccacatcatctgggtgcttggggattgctctgccctatccaccaccactggctcccaagtactcctcctgggaacctgaggacaagcttacccaatctaccactaccacaatagctggcacccacccccatgtgccacctgtggttcaaggactgtccaccaagcctgtcatagttactgccaacacaagcacagatctgttgtgagccaaaaggttgttcccccactgctactgccattgcccatgcaacacccactggccagggacccaaagacccttccacccactcaggccaccattaccactcctgacacccaagaagctacctgaaggcctaagaatcagcccacctagatccactaacaccagtgccaatgtatgacactctagggcccaagaacaggcatgcttagcctgctactgtaaccactggggaacaaggactggcccatctggtgtccctgtctccaacaaaatatcaccacagcctccactaacaaccacagcctaagccactgaggaaatctcagacaccattgacactgtttacagccaaagaaatcatacagagactacacaaatgcatgtacccaggatcaaagccaaagtgctctactcaacgaaccccatagacagagcttcaaggaagagtcctctgctataaatgtaaattcagaaaattagaagtaattattaaaccagatgtgcagatatcaatgcaaagatatagaaacatgaaaaagcaaggaaatatgacaggtccaatggaaaacaataattctccagcaatatatttcaatgaaaaaaaacttatgaaatcccagaaaaataattcaaaataatgatattacagaagatcaatgagacacaagagaacatggattaaaaaaaaaaaaacagagggtggagccaacatggctgaataggaacagctccagtctacagctcccagcgtgagaaacgcagaagatgggtgatttctgcatttccaactgaggtaccaggttcatctcactggggagtttcggaaagtgggtgcaggacagtgggtgcaatgcaccgagcatgagccaaagcagggcaaggcatcgcctcacccgggaagtgcaaggggtcagggaattccctttcctagtcaaagaaaggggtgacagacaacacctggaaaattgggtcactcccaccctaatactgcacttttccaatggtcttagcaaacggcacaccaggagattgtatcccgtgcctggatcagagggtcctacgcccacagagcctctctcattgctagcacagcagtctgagatcaaactgcaaggctgcagcaaggctgggggaggggcacacaccactgctgaggcttgagtaggtaaacaaagccactgggaagctcaaactgggtggagcccaccgcaggtcaaggaggcctgcctgcctctatagactccacctctggggagagtgcatagccagacaaaaggcagcagaaacctctgcagacttaaatgtccctgtctgacagctttgaagagagtagtggttctcccagcacacagctggagatctgagaacggacagactgcctcctaaactgggtctctgacacgcgagtagcctaactgggaggcacccccagtaggggcagactgacacctcaaacggctgggtactcctctgagacaaaacttccagaggaacgatcaggcagcaacatttgctgttcaccaatatccgctgttctgcagcctctgttgctgatacccaggcaaacagggactagagtggacctccagcaaactccaacagacctgcagatgagggtcctaactgttagaaggaaaactaacacacagaaaggacatccacaccaaaaccccatctgtatgtcaccatcgtcaaagacaaaaggtatactaaaccacaaagatggggaaaaaacagagcagaaaaactggaatctctaaaaatcagaatgcctctcctcctccaaaggaatgcaggtcctcaccagcaacggaacaaagctggacagagaatgactttgataagttgagagaagaaggcttcagacaatcaaactactccgagataaaggaggaagttcaaacccatggcaaagaagttaaaaaccttgaaaaaaaattagatgaatggctaactagaataaccaatgtacagaagtccttaaaggacctgacagagctgaaaaccacggcatgagaactacgtgacgaatgcacaagcctaagtagccgatttgatcaactggaagaaagggaatcagtgatggaagatgaaatgaatgaaatgaagcgagaagagaagtttagagaaaaaagaataaaaacaaatgaacaaagcctccaagaaatatgggactatgtgaaaagaccaaatctacgtctgattcgtgtacctgaaagtgacggggagaagggaaccaagttggaaaacactctgcaggatattatccaggagaacttctccaatctagcaaggcaggccaacattcacattcaggaaatacagagaatgccacaaagatactcctcgagaagagcaactccaagacacataactgtcagattcaccaaagttgaaatgaaggaaaaaatattaagcgaagccagagagaaaggtcgggttacccacaaagggaagcccatcagactaacagctgatctcttggcagaaactctacaagccagaagacagtgggggccaatattcaacattcttgaagaaaagaattttcaacctacaatttcatatccagccaaactaagcttcataagtgaaggagaatttacagagaagcaaatgctgagagattttgtcaccaccaggcctgccctaaaagagctcctgaaggaagcactaaacatggaaaggaacaaccggtaccagccactgcaaaaacatgccaaattgtaaagaccatcgaggctaggatgaaactgcatcaactaacaagcaaaataaccagctaacatcataaggaaaggatcaaattcacacataacaatattaaccttaagtgtaaatgggctaaatgctccaattaaaagacacagactggcaaattggataaagagtcaagacccatcagtgtgctgtattcaggaaacccatctcacgtgcagagacacacataggctcaaaataaagggatggaggaagatctaccaaacaaatggaaaacaaaaaaaggcagcagttgcaatcccagtctctgataaaacagactttaaaccaacaaagatcaaaagagacaaagaaggccattacataatggtaaaaggatcaattcaacaaaaagagctaactatcctaaatatatatgcacacaataaaggagcacccagattcataaagcaagtccttagagacctacaaagaaacttagactcccacacaataataatgggagattttaacaccccactgtcaacattagacagatcaacgagacagaaagttaacaagcacatccaggaattgaactcagctctgcaccaagcagacttaatagacatctacagaactctccaccccaaatcaacagaatatacatgcttttcagcaccactcacacctattccaaaattgaccacatagttggaagtaaagcactccgcagcaaatgtaaaagaacagaaattataacaaactgtctctcagaccacagtgcaatcaaactagaactcaggattaagaaactcactcaaaaccactcaaccacatggaaactgaacaacctgctcctgaatgactactgggtacataacgaaacgaaggttgaaataaagatgttctttgaaaccaacgagaacaaagacacaacataccagaatctctgggacacattcaaagcagtgtgtagagggaaatttatagcactaaatgcccacaagagaaagcaggaaagatctaaaattaacaccctaacatcacaattaaaagaactagggaagcaagagaaaacacattcaaaagctagcagaaggcaagaaataactaagatcagagcagaactgaaagagattgagacaccaaacaacccttcaaaaaatcaatgaatccaggagctggttttttgaaaagatcaacgaaattgataaactgttagcaagactaataaagaagaaaagagagaagaatcaaatagacgcaataaaaaacgataaaaggaatatcaccaccgatcccacagaaatacaaactaccatcagagaatactatcaacacctctatgcaaataaactagaaaatctagaagaaatggataaattcctcgacacatacaccctcccaacactaaaccaggaagaagttgaatctctgaatagaccaataacaggctctgaaattgaggcaataattaatagcttaccaaccaaaaaaagtccaggaccagacggagtcacagccgaattctactagaggtacaaggaggaactggtaccattccttctgaaactattccaatcaatagaaaaagagggaatcctccctaactcattttatgaggccagcatcatcctgataccaaagcctggcagagacacaacaaaaaaagagaattttagaccaatatccctgatgaacatcaatgcaaaaatcctgaataaaatactggaaaaccaaatccagcagcacatcaaaaagcttatccaccatgatcaagtgggcttcatccctgggatgcaaggctggttcaacatgcgcaaatcaataaacggaatccagcatataaacagaaccaatgacaaaaaccaaatgattacctcaatagatgcagaaaaggcctttgacaaaattcaacaactcttcatgctaaaaactctcaataaattaggtattcatgggacatatctcaaaataataagagctatctatgagaaacccacagccaatatcatagtgaataggcaaaaactggaagcattcccttcgaaaactggcacaagacagggatgccctctcccaccactcctattcaacgtagtgttggaagttctagccagggcaatcaggcaggagaaggaaataaagggtattcaattaggaaaagaggaagtcagattgtccctgtttgcagatgacatgattgtatatctagaaaccccatcttctaagcccaaagtctccttagctgataagcaacttcagcaaagtctcaggatacaaaatcaatgtgcaaaaatcacaagcattcttatataccaataacaaacaaacagagagccaaaccatgagtgaactcccattcacaattgcttcaaagagaatgaaatatctaggaatccaactcacgagggatgtgaaggacctcatcaaggagaaccacaatccactgctcaatgaaataaaagaggatacaaacaaatggaagaacattccatgctcatgggtaggaagaatcaatattgtgaaaatggccatactgcccaaggtaatttatagattcaatgctatccccatcaagctaccaaggactttcttcacagaattggaaaaaactactttaaagttcatatggaaccaaaaaagagcccacattgccaagtcaatcctaagccaaaagaacaaagatggaagcaccacgctacctgacttcaaactataccacaaggctacagtaaccaaaacagcatggtactggtaccaaaacagatatatagaccaatggaacagaacagagctctcagaaataatgccacatatctacaactatctgatctttgacaaacctgacaaaaataggaaatggggaaaggattccctatttaataaatggtgctgggaaaactggctagccatatgtagaaagcttaaactggatcccttccttacaccttatataaaaattaattcaagatggattaaagacttaaatgttagacctaaaaccataaaaaccctagaagaaaacctaggcaataccattcaggacataggcatgggcaagaacttcgtgtctaaaacaccaaatgcaatggcaacaaaagccaaaattgacaaatgggatctaattaaactaaagagcttctgcacagcaaaagaaattatcatcagagtgaacaggcaacctacagaatgggagaaaatttttgcaatctactcatctgacaaagggctaatatccaggatctagaaagaactcaaacaaatttacaagaaaaaaacaaacaaccccatcaaaaaattgggcaaaggatatgaacagacacttctcaaaagaagacatttatgcagccaaaagacacatgaacaaatgctcatcatcactggccatcagagaaatgcaaatcaaaaccacaatgagataccatcttacaccagttagaatggcaatcattgaaaagtcaggaaacaacaggtgctggagaggatgtgcagaaatagaaacacttttacactgttggtgggactgtaaactagttcaaccattgtggaagtcagtgtggcgattcctcagggatctagaactagaaataccatttgacccagccatcccgttactgggtatatacccaaaggattataaaacatgctgctataaagacacatgcacacgtatgtttattgcggcactattcacaatagcaaagacttggaaccaagcctaatgtccaacaatgatagactggattaagaaaatgtggcacatatataccatggaatactatgcagccataaaaaatgatgagttcatgtcctttgtagggacatggatgaggctggaaaccatcattctcagcaaactactgcaaggacaaaaaaccaaacaccacatgttctcactcataggtgggaattgaacaatgagaacacatggacacaggaagtggaacatcacacactgggcctgttgtggggtggagggagtggggagggatagcattaggagatatacctaatgttaaatgatgagttaatgggtgcagcacaccaacatgacacatgtatacatatgtaacaaacgtgcacgttgttaacatgtaccctaaaatttaagtataataataaaaaaaatccagaaaaacaattcaggagagaaatgagaaatttgccaaagagataaatatcattaaaaaaattctgtaactgaggaattcattaaatgaaataaaaaatacatttgaaagcttcgatcatacactatatcaagtagaagaacaaatttcagaacttgaaggcaggtcttttgaaataaccaagtcagattaaaataaagaaaaaaagaacttttaagaatgaaggaagactatgtgatctgtgggacaccataaagtgacctaatattcaaattttcagtgtctcagaaggtgacaagaaaacaaacaggatagaaaacctatttaaccaattcatagctaaaaactccccacatctagcaagagaattagacatccagatatgagaagctcagagatccccagagagatgcaagttaaaaaggtcttctccacggtacattatagtcaaactgtcaaaagttaaagagagaattaaaacagcaagagaaaagtgcccagtaacttagaaaagcacccccgtcaaactaatagcagatttatcagcagaaatcttacaggccaggacagaatgggataatatattcaaaatgttaagagaaaaataaaactgccactaaatatacaatacccagcaaagttatccttcataaatgaaagagaaataaagtcttttctagataagcaaaaactgagggaattcatcaccacaggacaagctctacaagaaatgcttatggagttctacccctggaagtgataagacaacatctaccaccatgaaaaaaaaaaaacatgaaagtataaaactggtagagcaaacacataaataagagaaagaattcaaatgttaccactacagaaaattaccaaaccacaatgttaaataagagagaaagaaaggaacaaattgtaggcaaagcaaacagaaatcaattcataaaatgacaggaataagccttcacatatcaataataacctttaatgtaaaaggattaaactttctactaaaaatatatagactggttgaatgaatacaaaatatagcccaagtatatgctgtctacaggaaactcatgtcacctgtgaagacacagagcgactgaaagtaaaggaatggaaaagatattccacacaaaggaataccaaaagtcagcaggagtagctatacttatgtcagataacacagactttatgtcaaaaacagtaagtaaaaagagatgaaaatgtcattatataatgataaagggaacaactcagcaagaggatgtaagaattctaaatttatcggttgggcacggtggctcacccctgtaatcccagcactttgggaggccaaggtgggcagatcacgaggtcaggagattgaaaccatcctggctaacaaggtgaaactccgtctgtactaaaaatacaaaaattagccaggcatggtggtgggtgcctgtagtcccagctactcgggaggttgaggcaggagaattgcatgaacccaggaggcggagcttgcagtgagctgagattgcaccactgcactccagcctgggcaacagagtgaaactccatctcaaaaataaataaataaataaataaataaataaataaataaataaataaataaataagcttacatgcactcaataccagagcccccaaatatataaagcaaatatgaatagatctataggactttcctctaataactagaacaagacaagaatgcctacttttcaccactcctattcaacataatactgaaagtcctagccagaacaattaggcaagaaaaaggaataaaaggcatacaaattggaaaagaagtcaaattgtccctctttgcagaggacataatcttacatctagaaaaatcttaagactccaccaaaaactcttacatctgaccaacaagttcagtgaagtttcaggatacaaaatacatataaaaatctgaagtaattctatgcaccaataataaattagctgagaaagaaatcaagagggcaatcctatttacaatagctacaaaaaaaaacttcgaaataaatttaatcaaggataaagacctctacaaggaaaactgtaaaccactgatggaaaaaaaaatgaagaggacacaaaaaaatagaaagacatcccatgctcatggactggaaaaattaatattgttaaaataacagatatggtttggctctgcgtcccctgccccccgcccaaaatctcatgttgaatcctaatccccaatgttggagaaaaggcctggtgggaggcaactgaatcatggaagcagatgtccccatgctgttcttgtaatagagttctccccagatctacttgtttaaaagtgtgtagcacctccactggctcctgctggccatgggaagatgttcctgcttccccttcactttccaccataattataagtttcctgagacctccccagaagcaaaatcctgtacagcccacagaaccatgagccaattaaacatctttattacccagtttcaggtatttctttacagcaattagagaataaactaatatagaaatttgcaaaaaggaaagtgggacatttctataaagatacttgaaaatgtggaagcagctgcagaactggggaatgggcaaaggttgcaacagtttggagggctcagaggaaggtagaaagatgagggaacatttggaactttctagagacttgttgaatggttgtggccaaaatgctgatagtcatatggacagtgaagtccaggctgaggtggtctcagatggagatgaggaacttattgggaactggagcaaaggtcactcttgctatgctttagcaaagagactggtggcattttgcccctgcctgaactttgaacttgagagagatgacttagggtatctggcagaagaaaattctaagcagcaaagcattcaagatgtggcctggctgcttccaacggcatatgtttatattcatgagcaaagacataatctgaaactggaatttatatttaaaatggaagcaaagtggaaaagtttgaaaaatttgcagcctggccatgtggtagaaaagaaaaaaaacatttcctggggaggaattcaagccagctgcaggaatttgcataagttaagaggatctgaatgttaacagccaagacaatgggaaaaatgtctccaaggcattttagagaccttcatggcagcctctaccatcaaacacctggatgcctagaagggaaaaatggttctgtgagccatactcagggccccgactgctctatgcagcctcaggacatggcatcccagctgccccagctccagctccagccatggctaaaaaggctccagatacatctcagaccactgcttcagagggtgcaagctgggagccaccaaggtgttaagcctgcaggtgggcagagggcaagagttgaggcttgggagcctctgcctggatttcagaggatgtatggaaacaactggatgtccaggcagaagtatgctgcaggttcagagcattcatggagaacctctactagggcagcatggatgcaaaatgtagggttggaagccccacacagagtccctgctggggcatggcctagtagagatgtgagaagggggccactgtactctagaccctagaatggtagatccaccaacaacttgcattgtgcacctggaaaagccacaggcactcaacaccagtccatcaaagcagctacaggggctatatcctgcaccacaggggtggagctgcccaaggtcttgggagcctacccatcgcatcactgtggcctgaatgagagacaaggagttgaaggagattattttggagctttaaggtttaatgactgctctgctgggtttcagacttgcatggggccctttgtttttgccaatttctcccttttggaaagggagtatttccccaatgcctatacccccattgtatcttggaagtaactaacttgtttcttattttacaggctcataggtggaagggacttgccttgtctcagatcagactttggacctggagttttgagttaatgctgaaatgagttaagacttggggtactgctaagaaggcatgattgtgttttaaaatgtgagaaggacatgagatttggcaggggccaagggcaggatgatatggtttggttctgtgcccccaaccaaatctcatgtcgaattgtactccccagtgttggaggagggagctggtgggagatgactaaatcatggggatggatttcccccttgatgttcttgtggtagagttctcctgagatctgcttgtttaaaagtgtgtaacacagccaggcatggtagctcacacccataatcccagaactttgggaggccaaggcgggcagatcacttgaggtcaggagttcgagaccagcctggtcaacatggtgaaaccctgtctctactaaaaatacaaaaagtagccaggcatggtggcgaatacctgtaatcccagctactcaggaggctggggcatgagaatcacttgagccaagaaggcagaggttgcaatgagccaagatcataccattgcactccagccatgataacggagagaaactctgtctcaaaaataataataataataaatacaataaaataaaagtgtgtagcacctctcccttcttactcactcttcctcctgacagccacgtggagatgtgcctgcttcccctttgcccttccaccatgattgtaagcttcctgaagcctccccagaagcagaagcctgtatagcctgcaaacctgtgacctgattaaatctcttttctttgtagatttcccaatttcaggtatttctttacagctgtataagaaaagactaatacaataaccatactaaccaaagcaacctgtagagtcaatgcaatccctatcaaaataccaatgtcattttttcacagaaatagaaggaaacactcctaaaatttttatgaaactaaaaaaagggcccaaatagccaaaccaatactaagcaaaaagaaaaaagctcaaggcataatgctatctgacttcaaaatacattacaaggctatataaaacagaacaacatggtattgatatcaaaacagacatagacaaatggaacaatacagagaacccagaaataaacccacatatttacagccaactgatttttgacaaaggtgccaagaacatacattggggaaaagacaccctcttctagaaatgatgctgggaaaattggatatccatatgcaaaagaatgaaatgagactaaaatcaactcaagatgaattaaagacttaaacatagacctgaaactataaaactactaggagaaatacttcaagacataggtctaggcaaagattttatggctaagacttcaaaagcaatggaaatgaaaacaaaaatagacaaaagtgactatactacaccaaaaagcttctgcacagcaaaggaaacaatgaacagagtgaagagacaatacgtggaatgggagaaaatatttgtaaactagtaatctgacaatggaccaacatccagaatttacaagaaactaaaacaactcaactattaaaaaaaaggacaactaattctattaaaaagtaggcaaaggacatgaatacataaataataaattctcaaaagaaaacataaaatcagccaacagacatgaaaaaatgttcaacatcactaatcatcaagaaaatacaaatcaaaatcacaatgaaatatcatcttactgcagctagaatggctactactaaaaagacaaaaaaataacagatgccagtgaggaggatgtggagaaaagaaaacttttctaactggagagttctcaaaaagcaaaaaacagaactaccatagcatccagcaatccagctactaggtatttatccaaaggaaaggaaatcagtatatcaaagagatacctacacctccatgtttactgcagcactattcactgtagcaaagtcataaaatcaacctcagtgtcagaaaatatggtctatatacacaatggaatactatttggccataaaaaaaataaatcatgtcattttctgcaacatgggtggaactggaggtcattatgttaagtgagataagccaggcacagaaagaaaaatactgcatgttctcccgcatacatgagaggtaaaaaaaaaatgtggtcatgatcatggagagagagtatagacccgaggttaggaatgatgtgtgggtaggagggtgggagatgaggaaaggttggttaatgagtacaaacctatagttagatagaagggaaaagttctatgttcaatagcagagtaggatgactatcattaacaacaatgtattatatcaaaatagctggaagagaggacttgaaatgttcccaacacatagaaatgataaatacttaaagtgatgagtcctaaataccccgacatgatcattatacactctaggcttataagaaaataacatgtatactccataaatatatgcaaatatgtaccaataaagacataacaattaaataaaaagaaaaaatttcacagaacatattttgataaatacattaaaaactggtaatagacatggcttccagggagagaacctgagaactgaggaacttgcaggaaataaacaggagacctgttttttactctataccttttgtacctttagaaatgtttaccatatatgtgtatttatttaattgcatttatttaattgaatttatatatttataccatatatattcaattaaataaatttatttcagaaataaatttcagagaagtcctcacagatcttgacacatattatttaaccttcttaataatgatataaaggttatctggcaaagctttatttttaagatatttatactatgcacagttaatgctatttatgctacaatatgcacagtatattaattgcaagcatcttttacatttccctcgagtcagtacaactgactaaatctaaaaataaagtgttgggattgatatttctgggatggtggtctaagcataatggaaacacctttaatataacatgctgtttttcaaatatactacaaaatattgttggacaaaaaaagatgaaaggtattttagtactgtgctaataaataccagagtaaacactatagaataagttcatacaaatgacaggagaacgagtcatgattatgcccagacaggtccacagaaaatatactccctttttaaatttttaatagtttttaaattttattttaatcgggcatattgagcaataaacagctctttcttccagctaactttgcccactttctggcaaacatacactttgggaatatttatccatttatgcaaaagtaaaatggttgctataaaataggttgaatcaagcagattatttcagcttaactcctttctctgtaaacacaactcaataaacataacaacactctagatatcatttttactggacatttcattttaatgctcttgaaatctaactttatcgtggcttttacgaatatctctttcatttcagttaatcttatatctgtcttttaagataattcaatatctacagacctcatttctatataatgaagcatgtgaaagatttaccaatctaatgtcatatcaaaacaaacagaaatgaatgacgtctgaggaaggaaaaggttgccactctcaaaattcagaagctgttaattcacaaattggtacattgcatcatgattccaccccatttgtttgtgcacttcaaagaatacaagctcctgaatttacatttaaacatacaggtagttttactcatttacttcctttttcaaatcaagaaaagtttatcattctgaactagttggagtcaatggcctatttatcttaattctataccgccctattttttttcccttcaacttgtattaattcagcatctgatcctggcctacatgaatggggcaactcttaaattgcttcagtatcatttcttcagattacaaagcctcttaagggttattttctttttccttttataaatctatgcactaccttagtatagagtcttcaataaattttgattacaccacatttttaaagcaagggcaatttagttaacctatttggtaaaaagaaatatttcattgtatagtatatcaatttacttatcaaagtctatttttaaaataatccatctttttatgttaaattatgattattaataccctggctcttgcttccaataagatacgctgaaaggtaggttatgctgagcttactacattgtcataattgttgttatatgtacatcctggagattggtaccatcattgctttagatttggagtccattacagagacatttctagcatagtaattaatttttattctccattttccatgtgggtaaactgattggggagtgggtgatagaggagagcaaccaatccttcttgcaggctaactgaaggcaaatataataaaacccccaacattttttatctcaataacctgatcttgttgaataaaaaaaatcagcttgcaatttgaaattatcgttggggaaaagggaaggatactaagacgaaaaaactaagtttccaaggaaatatatataaacatatttctctgatagttaaaagaggagcttcattctaattgacgacttcttactgaatgacagtttacaagcaacctaaactcactctttggagggaaaagtattttttaccttaaaaatattgtttaattgtttgttcttctgtttcaaaagcacatggatgtattctatagatgaggatgattacagagctacaaagtttaccacagtttcagtcatcagtgctcccacccatagagtgtcatcctcagaaaccatctggtgctccttctgcataattagcaaaatattgacttagcacttaacactctagggaggattaaaccaatttttttaagcaagaaaaattccagccaagtcaaaacagaattgcaatgtatcaaaactttctctaaaggagatgttttttatattcccaggctttacctgttttgtttttgtttttgtttttgttttttttaatgtagtacctgaattctacaaatagatattcagtgagtagaatgctggcaaagcagatgttgccccttgcatccacccactgaattcttattccctatttggttgtctgcagtggtgaatcagagcaaggtgactcagtcaaactaatgacaagaaacttaagctacacttgcctcacagtgtttaccttgaaataagactattaagctactgaaacttaaaagcgcaggagctagccaagttgcaaaataacatgcaggatgagaccactgcatcataatttctctaattgtttttcttagagcagatgtctaagatgagttccacacattaaaaacaaaaggaaggagattaaggttttgaactatggctctgacaagcccatttcagtgtcttacagtcatcagaattcattcaagaggaaagcaataagcatggcaagacataactaaacaaagtattacactttaaaatgtcttatttcagaacagcagattgtatatatgttctttttttgtcccaacttccatgaatcagacatttgcctaaggacaatagaaaccaaccaaaacctaccatcttccaaacacttgatgtacaccagaaaatgtggtgtcaaggtagacaagaaaagagtactaagggctatatgtcccaaattgtgtatcaaggcaccccaagacaccataaagaagtcacagaagtactgggggatatcttaactttttaagagaaatagtaacacatgacatttgttgatcacttagtgaaccgcaaacacaaatcagtttacggtttcaacattacatcacaccacattcatctctatgacatcacatctttgcaaagctgggttttcagtggttcctgtgataaaaagcaactatgctaaaatccatgtggaacaggaaatgaggacagcaacattcaatctgtttgcagtgtctgaaaagtgtgcagtgctcaagaagcacacacatctcattaataattgtgattatttaagaataaaattaaagtagtgcttttggcttcaatatatctgtattatttcttcaaagagctactaagttattagtatataaatattgaagtttttttttatcccaaccatgtagtaaagtaaactgttaggtatttcttttggaccaaagtcactgtgaaaaaattactgacacactaaagacactgtgaaccaagaaaatttgacaacttctggcacagggccttaaagcctgcttgatcatgaatgtaaaaaactcaagtaaataaatgcaagtcactggtgataagtaaaggaaaataacaaaactatctgaaaatgcacttttataaccactgcctgagtaatcagggtccagaagaagggaatgactctgggagtactgtgagtaaaatcaatagtctcaacatcagtaccaaataagtcagttccttgaaatgtatatgcaatctagaaaggaaacatatggaaaggaagcaatgagacaacctgaaaaaagtaaatcagtaacactctacatactgaaagaaaaactcactttctagtttctagtttctacaacacattgttaggttagaaagtgatagagacaaaaagaagcatatgtgcaacttcacactcaggaggtcaactggcagtagtatgtggtggttttttctgatcccaaactaaaatgtaactaagaaaatgtacacaagcttatgagagaaagagataatttaaaaagaaataaaacaaaattataggactttaaagcactcacacactcaaaagagagggacacaggggataaagtaaaacagtggaagggggccgggcacagtggctcaggcctgtaatcccagcactttgggaggccaaggcgggcggatcacttgaggtcagaagtttgagaccagcctggccaacatggtgaaactccatctctactaaaaatacagaaattagccgggcaaagtggcatgtgcctgtaatcccagctacctgggaggctgaaacaagagaattgcttgaacccgggaggcggaggttgcagtgagctgagatggtgccactgcactccagcctgggcgacagagcaagactccatctcaataaataaataaacaaacaaacaaaccagcaaacgatgtaaggggaagaatcatctccgcacagagtaatgttgctgagaagatgttgaaatcacagttcttggcattacttgaactgtgattcaaacaagaacaccactagaacattacagtaaaacacaatgccgacatatataaaggaatgattcttattccacaaataaaaaagatgagactcaaatccaattgagttttacattcttaataggcacacaagatttttaatgtaaaagcaaaaatccatctaaatgtaagactgcaaactgttgggattacacctgtaatcccagcactttgggaggccaatgcgggagaattgcttgagcacaggagtttgagaccagcctgggcaacaacagtgagacctccgtctctacaaaaaaattattttaaattagccaaacatgatagcacatttttgtagttccagctagtcaggaggctgaggtgagagaatcgcttcagcccagatggtcaaggctgcagtgagccgggatcataacactgccctccagcctgggcaacagcgcaagtccctggctcaaaaaaaaaaaaaaaaaggtgtttaaaaaaataataccaccatgtacatattgttacatgttctttaaatgaattagagacaacggaggagttatctgtgatatctatgcagttatttcactaaaagtaggtcagcccaaaagaaaactggtaaaagcagagtaacattggtacataatagttgccactagcccaaagaagtgcatgatcttgctttccctgctattagctaactgtgtaacctctgaaatgtcactaatattatggtttctcagttttcccagacttataaaatagataatatataatatttattgtgtcagagttttttttttcttttattattatactttaagttttagggtacatgtgcacattgtgcaggttagttacataggtatacatgtgccacactggtgcgctgcacccactaactcgtcatctagcattaggtatatctcccaatgctatccctcccccctccccccaccccacaacagtccccagagtgtgatgtttcccttcctgtgtccatgtgttctcattgttcaattgccacctatgagtgagaatatgcggtgtttggctttttgtgcttgcgatagtttactgagaatgatgatttccaatttcatccatgtccctacaaaggacatgaactcatcattttttatggctgcatagtattccatggtgtatatgcgccacattttcttaatccagtctatcattgttggacacttgggttggttccaagtctttgctattgtgaacagtgccacaataaacatacgtgtgcatgtgtctttatagcagcatgatttatagtcctttgggtatatacccagtaatgggatggctgggtcaaatggtatttctagttctagatccctgaggaatcgccacactgacttccacaatggttgaactagtttacagtcccaccaacagtgtaaaagtgttcctatttctccacatcctctccagcacctgttgtttcctgactttttaatgatcgccactttaactggtgtgagatggtatctcattgtggttttgatttgcatttctctgatggccagtgattatgagcattttttcatgtgttttttggctgcataaatgtcttcttttgagaagtgtctgttcatgtcctttgcccactttttgatggggttgtttgtttttttcttgtaaatttatttgagttcattgtagattctggatattagccctttgtcagatgagtaggttgcgaaaattttctcccattttgtaggttgcctgttcactctgatggtagtttcttttgctgtacagaagctctttagtttaactagatcccatttgtcaattttggcttttgttgccattgcttttggtgttttagacatgaagtccttgcccatgcctatgtcctgaatggtattgcctaggttttcttctagggtttttatggttttaggtctaacgtttaagtctttaatccatcttgaattgatttttgtataaggtgtaaggaagggatccagtttcacctttctacatatggctagccagttttcccagcaccatttattaaatagggaatcctttccccattgcttgtttttctcaggtttgtcaaagatcagatagttgtagatatgcggcgttatttctgagggctctgttctgttccattgatctatatctctgttttggtaccagtaccatgctgttttggttactgtagccttgtagtatagtttgaaggcaggtagtgtgatgcctccagctttgttcttttggctttggattgacttggcaatgcgggctcttttttggttccatatgaactttaaagtagttttttccaattctgtgaagaaaggcattggtagcttgatggggatggcattgaatctgtaaattaccttgggcagtatggccattttcatgatattgattcttcctacccatgagcatggagtgttcttccatttgtttgtatcctcttttatttcattgagcagtggtttgtagttctccttgaagaggtccttcacatcccttgtaagttggattcctaggtattttattctctttgaagcaattgtgaatgggagttcactcatgatttgtctttctgtttgtctgttgttggtgtataagaatgcttgtgatttttgtacatcgattttgtatcctgagactttgctgaagttgcttatgagcttaaggagattttgggctgagacaatgaatcaaatagacgcaataaaaaatgataaaggggatatcaccaccgatcccacagaaatacaaactaccatcagagaatactacaaacacctctacgcaaacaaactagaaaatctagaagaaatggataaattcctcgacacatacactctcccaagactaaaccaggaagaagttgaatctctgaatagaccaataacaggatctgaaattgtggcaataatcaatagcttaccaaccaaaaagagtccaggaccagatggattcacagccgaattctaccagaggtacaaggaggaactggtaccattccttctgaaactattccaatcaatagaaaaagagggaatcctccctaactcattttatgaggacagcatcattctgataccaaagtcgggcagagacacaaccaaaaaagagaattttagatcaatatccttgatgaacattgatgcaaaaatcctcaataaaatactggcaaaccgaatccagcagcacatcaaaaagcttatccaccatgatcaagtgggcttcatccctgggatgcaaggctggttcaatatacgcaaatcaataaatgtaatccagcatataaacagagccaaagacaaaaaccacatgattatctcaatagatgcagaaaaggcctttgacaaaattcaacaacccttcatgctaaaaactctcaataaattagctattgatgggatgtatttcaaaataataagagctatctgtgacaaacccacagccaatatcatactgaatgggcaaaaactggaagcattccctttgaaaactggcacaagacagggatgccctctctcaccactcctattcaacatagtgttggaagttctggccagggcaattaggcaggagaaggaaataaagggtattcaattaggaaaagaggaagtcaaattgtccctgtttgcagacgacatgattgtatatctagaaaaccccattgtgtcagagttgatgtaagagaggaatgtgatgatagaatgaaaattctttgaaaatataaaattttacaatcaagacatcattataaccactcaaaatagtacttttgctttcattctcatatgagcttaggaagagccagacatgctagcaatgcagtttcaatacttcttacatataacctatacatttaacatctatatatattacacccaatgttaggacttaaacccatggccacatcagatacatgggcatcaaagatcaagaaaatataactgtcactatgatgagattatttaaaacagttcattaaaagtattcctgaataactgattgcccaatcctctaaagtatatctacaaaatgcatattgagtctgaaaactaatctgtcactaggttcatttccaaatgaaatatttgtcattatttatgccatttccaaaatgattctcaaatttaactactttctattctctcactgcccttgactaaccccttactgcctctcaactaaacttctaaacagcctaattgatacctttaattctaatatcttctgtctattcattgctcgccccatccataatctttccagttatcttccttaaatataaatatgatcatgtcactagtatgttcaaagtctgtttggctccacagcagtcctacacataaagcctgaaatctttaccgtcctgttaaaggctttcataaatgtggccaaattttctttcacagcttcatcttgaagacagacaacaattctgccaaataagattgttcactgcttcctcaaaataggctgcatttccctcccttcagggctttatttatgttccttcctcaaagcaagtggaacgtcattccccttcaactctacctgttaaatacaaaatgctacttcctccacgaagccctcctgaaagttaactctcccaattggagttaatctcttattctttagcataatgatagcatgcgctttatactttgcttagacagacaagttttgctttatattacaataatttatataatacctattgtcttcttcactaggctataagctcattgaggggagaagacttgtcttatttattttaattacccctacaaagcctagaagagttctctgaatatccagagctctgtaatatgtctactgaagttaaaaatggaaaatccttacgcaaacaaactttatccagaaaaatcatagctaagaaattaatatgaacacattcccatgatagatcaaaggaaatatttgctgtgctgtgtgccacatcatattttatatcttgtctacttcaaacactggcaactattttcaacacaaaaaaaacgtaaataagctgtacttataccctttaatttattttcgaaaatacaacagtgatttgttcaataattgtttcatggcaaaacaaatgtatctgcctttcaaaaaacctctatttctcaaactcaattcatgaacataagtcattatccttcaaaagctggaaagaagagtaaatttgctatccaaagtatatactattcatatctgagcagacctctcctttctacttatgtcactaacagtactcctcttatacctttcttctgaaagcaaagcgctttcaaatccactagtacatgtcccagtaagaaagagagaaaggctattgatccccacttagcagattttgagaaagtggagatcaaagaagaaaaaaacataaatgaactttcattttcagtggctagaataaaaatccaattttttttttaattcagggggtacatgtgcagatttgtcacctgagtatattgcataatggtgacgtttgggatcctgttgactttgtcactcaaacagtaaacattgtacccaatgggtaatttttcaacccttgcctctctccaaccctctcccttttggagttcctggtgtctattatttccatctttgtatccacatgtactcatcattttgatcctgattatacacaaaaacatgcagtattcctgtttctgagttatttaacttagcataatggcttccatctagttccatcgatgttgctgcaaaggacatgatttcattcttttttatggctcagtagtattctatgatatatatatatatacaccacattttctttatccaatcaaccactgatggacacttaagttgattcagtgactgccatttgtgaatagtgctgcagtaaacagatgagtacaggtgtctttttgataaaatgatttcttttcctttgggtagaaacctactagcgagattgctgggtcagataacggtagttttatttttagttatttgagaaatttccatactgttttccatagaggttaatttacattcccaccaacagtacataagtgttcccttttatccacgtcctcaccaacatctgttatttttgactttttaatagcaattttgactggtgtgagatgctaactcattgtggtttttaatttgcatttctctgatgaattagtgttgttgagcattttttcatgtattttttggccacttacatgtcttcttttgggaagtgtctgttcatgtcctttgcccaaattttaatgcagttatttgttttattcttgttgatttgtgtaaattcgtcatagattctggatatgttttttgttagatgcatactttgcaaatattttctccaattctgtaggttgtctgtttaatctgttgattgtttcttttgctgtatagaagctctttagtttaattaagttccacttgtcagtttttgtttttgttgcatttgcttttgaggtcatagtcatgaattctttgcctaggccaatgatgagaaatgtgtttcctaagttttcttccagaatttttatagattcaggtcttatagttaagtctttaatccattttgagttaattcttctatatggtgagatacaggggttgtttctatcttctgcatatggctagccatcaacttgtttattaaccgtgtcttccaaattctattcaccaggttaaacttcttaaagtaaaccttgggccgagccaagatggccaaataggaacagctctggtctacagctcccagcattagcgacgtagaagacgggtgatttctgcatttccatctgaggtaccaggttcatctcactagggagtgccagacagtgggcgtaggacagtgggtgcagcacaacatgtgcgagccgaagcagggcgaggcatggcctcactcgggaagcgcaaggggtcagggagttccctttcccagtcaaagaaaggggtgatggacggcacctggaaaatcaggtcactcccaccctaatactgtgcttttccaatgggcttaaaaaacggcacaccaggagattatatccagcacctggctcagagggttctacgcccacggagtctcgctgattgctagcacagcagtgtgagatcaaactgcaaggtggcagcgaggctgggggaggggtgccccgccattgcccaggcttgcttaggtaaacaaagcagccgggaagctcgaactgggtggagcctaccacagctcaaggaggcctccctgcctctgtaggctccacctctgggggcagggcaccgacaaacgaaaagacagcagtaacctctgcagacttaaatgtccctgtctgacagctttgaagagagcagtggttctcccagcatgcagctggagatctgagaatggacagactgcctcctcaagtgggtccctgacccctgaaccccgagcagcctaactgggaggcacccccagtaggggcagacggacacctcacacggccgggtactcctctgagacaaaacttccagaggaacgatcagacagcagcattcgcgattcacgaaaatccactgttctgctgccaccactgctgatacccaggcaaacagggtcaggagtggacctctagcaaactccaacagacctgcagctgagggtcctgtctgttagaaagaacactaacaaacagaaaggacatctacaccaaaaacccatctgtacatcaccatcatcaaagaccaaaagtagataaaaccacaaagatggggaaaaaaacagagcagaaaaactggaaactctaaaaagcagagcgcctcttctcctccaaaggaatgcagttcctcaccagcaacggaacaaagctggatggagaattactttgacgagttaagagaaggcttcagatgatcaaactactccgagctacaggaggaaactcaaaccaaaggcaaagaagttaaaaactttgaaaaaaatttagacgaatgtataactagaagaaccaatacagagaagtgcttaaaggagctgatggagctgaaagccaaggctcgagaactatgtgaagaatgcagaagcctcaggagccgatgtgatcaactggaagaaagggtatcagtgatggaagatgaaacgaatgaaatgaagcgagaagagaagtttagagaaaaaaagaataagaacaaatgaacaaagcctccaagaaatatgggactatgtgaaaagaccaaatctacgtctgattcgtgtacctgaaagtgacaggaagaatggaaccaagttggaaaacactctgcaggatattatccaggagaacttccccaatctagcaaggcaggccaacattcacattcaggaaatacagagaacgccacaaagatactcctcaagaagagcaactccaagacacataattgtcagattcaccaaagttgaaatgaaggaaaaaatgttaagggcagccacagagaaaggtcgggttacccacaaagggaagcccatcagactaacagcggatctcttggcaggaactctacaacccagaagacagtgggggccaatattcaatattcttaaagaaaagaattttcaacccagaatttcatatccagccaaactaagcttcataagtgaaggagaaataaaatcctttacagagaagcaaatgctgagagattttgtcatcaccaggcctgccctaaaagagctcctgaaggaagcactaaacatggaaaggaacaaccagtaccagccactgcaaaatcatgccaaaatgtaaggaccatcgagactaggaagaaactgcatcaactaacgagcaaaataaccagctaacatcataatgacacgatcaaattcacacataacaataataactttaaatgtaaatggactaaatgctccaattaaaagacacagactggcaagttggataaagagtcaagacccatcagtgtgctgtattcaggaaacccatcccacgtgcggagacacacataggctcaaaataaaaggatgaaggaagatctaccaagcaaatggaaagcaaaaaaaggcatgggttgcaatcctagtctctgataaaccagactttaaaccaacaaagatcaaaagagacaaagaaggccattacataatgctaaagagatcaattcaacaagaagagctaactatcctaaatatacatgcacccaatacaggagcacccagattcataaagcaagtccttagagacctacaaagagacttagactcccacacaataataatgggagactttaacaccccactgtcaacattagacagatcaacaacacaaaaagttaacaaggatatccaggaattgaactcagctctgcaccaagtggacctaatagacatctacaggactctccatcccaaatcaacagaatatacattttttttcagcaccacaccacacctattccaaaattgaccacatacttggaagtaaagctctcctcagcaaatgtaaaagaacagaaattataacaaactatctctcagatcacagtgcaatcaaactagaactcaggattaagaaactcactcaaaaccgctcaactacatggaaactgaacaacctgctcctgaatgactactgggtacataaggaaacgaaggctgaaataaagatgttctttgaaaccaacgagaacaaagacacaacataccagaatctctgggacacattcaaagcagtgtgtagagggaaatttatagcactaaatgcccacaagagaaagcaggaaagatctaaaattgacaccctaacatcacaattaaaagaactagaaaagcaagagcaaacacattcaaaagctagcagaaggcaagaaataactaagatcagagcaaaactgaaggaaatagagacacaaaaaacacttcaaaaaattaatgaatccaggagctggttttttgaaaggatcaacaaaattgatagaccactagcaagactaataaagaaaaaaagaaagaagaatcaaatagactcaataaaaagtgataaaggggatatcaccaccgatcccacagaaatacaaactaccatcagagaatactacaaacacctctacgcaaacaaactagaaaatctagaagaaatggataaattcctcaacacatacaccctcccaagactaaaccaggaagaagttgaatctttgaatagacccataacaggctctgaaattgtggcaataatcaatagcttaccaaccaaaagagggaccagatggattcacagctgaattctaccagaggtacaaggaggaactggtaccattccttctgaaactattccaatcaatagaaaaagaggaaatcctccctaactcattttatgaggacagcatcatcctgataccaaagtcgggcagagacacaaacaaaaaagagaattttagaccaatatccttgatgaacattgatgcaaaaatcctcaataaaatactggcaaaccgaatccagcagcacatcaaaaagcttatccaccatgatcaagtgggcttcatccctgggatgcaaggctggttcaatatacgcaaatcaataaatgtaatccagcatataaacagaaccaaagacaaaaactacatgattatctcaatagatgcagaaaaggcctttgacaaaattcaacaacccttcatgctaataaaaactctcaataaattaggtattgatgggacatatctcaaaataataagagctatctatgacaaacccacagccaatatcatactgaatgggcaaaaactggaagcattccctttgaaaactggcacaagacagggatgccctctctcaccactcctattcaacatagtgttggaagttctggccagggcaattaggcaggagaaggaaataaagggtattcaattaggaaaagaggaagtcaaattgtccccgtttgcagatgacatgattgtatatctagaaaaccccattgtctcagcccaaaatctccttagctgataagcaacttcagcaaagtctcaggatacaaaatcaatgtgcaaaaatcacaagcattcttatacaccaataacagacaaacagagagccatatcatgagtgaactcccattcacaattgcttcaaagagaataaaatatctaggaatccaacttacaagggacgtgaaggacctcttcaaggagaactacaaaccactgctcaatgaaataaaagaggatacaaacaactggaagaacactccatgctcatgggtaggaagactcaatattgtgaaaatggccatactgcccaaggtaatttatagattcaatgccatccccatcaagctaccaaggactttcttcacagaattggaaaaaactactttaaagttcatatggaaccaaaaaagagcccgcattgccaagtcaatcctaagccaaaagaacaaagatggaagcaccacgctacctgacttcaaactatactacaaggctacagtaaccaaaacagcatggtactggtaccaaaacagagatatagatcaatggaacagaacagagccctcagaaataacgccgcatatctacaactatctgatctttgacaaacctgagaaaaacaagcaatggggaaaggattccctatttaataaatggtgctgggaaaactggctagccatatgtagaaagctgaaattggatcccttccttacaccttatacaaaaatcaattcaagatggattaaagacttaaacgttagacataaaaccataaaaaccctagaagaaaacctaggcattaccattcaggacataggcatgggcaaggacttcatgtctaaaacaccaaaagcaatggcaacaaaagccaaaattgacaaatgggatctaattaaactaaagagcttctgcacagcacaagaaactaccatcagagtgaacaggcaacctacaaaatgggagaaaattttcgcaacctactcatctgacaaagggctaatatccagaatctacaatgaactcaaacaaatttacaagaaaaaaacaaacaaccccatcaacaagtgggcgaaggatataaacagacacttctcaaaagaagacatttatgcagccaaaagacacatgaaaaaaatgctcataatcactggccatcagagaaatgcaaatcaaaaccacaatgagataccatctcacaccagttagagtggcgatcattaaaaagtcaggaaactacaggtgctggagaggatgtggagaaataggaacacttttacactgttggtgggactgtaaactagttcaaccattgtggaagtcagtgtggcgattcctcagggatctagaactggaaataccatttgacccagccatcccattcctgggtatatacccaaaggactataaatcatgctgctataaagacacatgcacacatatgtttcttgcggcactattcacaatagcaaagacttggaaccaacccaaatgtctaacaatgtagactggattaagaaaatgtggcacatatacaccatggaatactatgcagccataaaaaatgatgagttcatgtcctttgtagggacatggatgaaattggaaatcatcattctcagtaaactatcgcaaggacaaaaaaccaaacaccgcatgttctcactcataggtgggaattgaacaatgagaacacatggacacaggaaggggaacatcacactccggggcctgttgtggggtggggggagtggggagggatagcattaggagatatacctaatgctaaatgatgagttaattggtgcagcacaccagcatggcacatgtatacatatgtaactaacctgcacattgtgcacatgtaccctaaaacttaaagtataataataataaattaaaataaataaataaagtaaatctctctcccaaatttcataatgtgatactaactttaaaagtactaacttatctaaatattaatccagcctttcgtatatcaattttacttaaaataagacccagatatttttaaactggcaagaaaatagagacatagaacacaaaagagaaattaaggtcacagaatgaactcaaatgtggcattgaggactacagtcctcttaattctataaagtttttaagtttttccccggacatcttctaagatactcttacccacacctacatgcataaatgtagggagaaggaactatggcagattatataatagatagaaacactttttaaacaaactttcatgccctaatacagtagatcccaatccaaagaagaagctccagcggccaaaaaggacttttcactcaggagcaacagccagatatcagctgttcattgcaagtatcctgactggcatctcagttactttaaagaggctcataaaaattcctagagcactgaagagggaaaaaaaaatcaacctaggcaattagtcaaaagaaaagggtcactgccacagacacttcattttagaatcctggaaactgacagcttcatgaaattgcatttccactttctaatatttaactatttctttactcttttttgttgcaaccctcagctggaacctgctctgggaacagtatttaattgctaccctgggtgaaattaagttaatctaatttacctctcccagatgtattcatattttatacttgctcagtaatcctgaaatgggaagataagtgctgaagagggaaggaatctaacatgtcttagaagcctaacacatgtggtaggttgtattatgttccaaattatcttttcccaccctttgccatgtgacttcttttgcctcccaatagatgaaatacatttctttgcctcatcaccaggcttagacatataacctggctaacagaatatgagaagatgtaacaaatgccatatctgtacgaaaactattaatgcacctgcatagtgttgtattcttggcctctgtttggagaacagcatgtcccagataggagctgctccttcaatttgaatcacagactgaaatgacatacagagaaacaaacagagacaagtagagccacagccaacctgcaaacccatcactgaaaaataaatgtctgtcgtttcaagccactgggacttcgggagtcattgtgacggcagcaaagctccaaaacacaaaaattggtaaaagaaatggttttatggtacataacaacctcaaaatcttagtgacttacaaaaataaatattcatttctcaggttgtattacaagttggtggatgcaggtcagcttctgtgtctctgctcaaggctgtgagtcagattcaagcccgctccattattttcttattctagatctcagtttgcaggtacatcccacgtatgaaacatgcccttcttgtaacataaggcacaggataagaggcccggtagaaattttacaatgtttctaaaagtctgctcataattacatggccaaagtcaatgggaaggaggaaatatacttactctataagaaatgaagaaataagtacaatatgtcacacttactatattccaatcattgttgtagctgtgttttacataagttatctcacttacatctcataccaatatttcaaggaagacgttattctcatcttttagaaaattcagactcagagaagtaatctaacttgtccaaagttattcagagggtgtgtgaagggagggctagggtcccagtccacgaatatgtgactccaaagcatttgctcttacttccatcccacattcacactcagtttttctctgtcaagttataagcattaacttaacagatgggatctgtccttgtgtaaaaccagtattggctatcacagatttcaataggtaacctttctaagtgaaatagggaaatgtaagggtagtgaaaaagaggggaacgtctatgaaaatagacttatgaaatgataggcagaaatgagcacaacaatgagaagatatgtgaatgagaacccaaggaactggaaaataagaagagaaattgatagcacttctctgggcaagagcactttcaaaaatagcttgcctcaggggaaaactttttagactctgatttcacaggccataagaaaagcactagggtgtttccctttccttcaaaagtacacacccagttattttgtagctgcctgaatactactatgtattcactctagtgactgttttgagactggtggtctcctaccttatgggcattgagtgctttttaaaaatctaaaacccatgccatccctgatgcacctggacaggctgctctcaacacattttttatctgagtcacatctttggagcttcagaccacgatatgtctgccaatttctaccacagttttaatctatttgaaatattaacatactataatagcaatgtaacttctaagttgttattgttgatattattaattcaagaattaaaacactgaatacattattatgccagcagaaaattgtctaaccatcaggtaaataataattagagttatagaagcaccataggatattagttcctgaaacagaaagctggaaaatcttatagcaggcctccaagccagatagccagactgccaaaatctccgagtgatacagtacattactactaattaagtcttgtataagcattccatgctattttgtttggctatattggaagatcctgttactctaacacacaatggagagaaaaagaaaaacaggcaaatattttcccaggcatgagaagaaaactgcagcagtcaattcttgtccatacaatttggcctaactattctcctcttcaaccttgacatttgtccccaaatgttgctatccagctaaccactcacaatcttccagtaaaataaataagctatatttacctatcatggctttggatattttcctgtaattcagaatgtcaaataaattacacggtatattaaacaagaatggaattaattggtgcataaataatgtatctcagaaatattaccttgttcattctcaggtatcagtggactattctagttggtggcactcagaccctttaacattgatccctttaacagataatccaaaagagaaaaaaatcttaccaatgcagtatgtgtctgtgcacacccagatgcaaaacatcaaaataaatttatgacctattattattattattgcttatatgtgtgggtggataaaatgtacagaaacgcttattaaatttaaattagccaaaaggtggcagtagaaagtctaactatgaaacacagcataaaatctcatttatccaaaatttgtgattgtataaacaaggactggatgacatataacagaaaaaaaaacacagctttgcagtcagatagatctagcctctaattccagctctattactgtgtgacactgcactatcagcttctctgagcctcagatttctaatctttaaatgagacaactttgaaaatatacaggatttttaaggatcaagagagataataattgcataaacctcattggacaaggcttaacacatggtagatactcagtaaatgttagaaaatgtttgacataaaaggagtagaggatataaacatttttttaaagtgcaattcagaattcttgttaaagtgaagaaataaaagcaattttttctttacccttctcctttgaaaacaactaaaatgaatgcaaaatgggaggtggaagactcttcaatgatacagtgaaacacctaaaagctcaagccacagtatgaaaaatatctgccaaatacattgatatctgagccagaataagggagaatacaacctgacaccaaccacctcatgttcaagcaagaataaatttctctaaacgtatgaaaggatatcaaattctcctttgattaaagtgataagacttagggccattatagacaacagaactaataggaaatattcctgcgaagaaatatcccagctccacactgatgaattgaaggtaaagtagagctgaataaagaagaaacatgcagacagactatcttgtctataatctaatctcctaagacactgtccgaggtgaaggaaaggaagcagagatgaccagatcacaacacggatagcctgacttaaggtgcttcgttgtaagccacaccaaacttctaatgccaaaaactaaggagagatataggaaaataatgtaaacatattttatatatatatagaatgtaaatatattatatatagaatgtaaatatatataaatatatataatgttaaaatatatatattcctctatatatatatatatgttcctctacagatagatagatatacatctctatatagatatatatttcagattaaattaaacttctgtaaatttggtgattgttgcaataaggacacaccaagggaaagagaagagaatgtttcctcatagatatatatagagagaaagagagaaaggaaaaaatatatatacatatatgaggattttcaagacaacaaatcccagttaaatctgctgggactaattttttaaaacttgcccctacacaacccctcctaatattatttttcagcaagtagctatccagtattaaaatgcccccatttgaagataagcaataagaaaaaatcagcactggacccatatatacatttataataaaaaaagaatataatttaaagagatgggcatatatttaattcaagctgaatgtattaaattctactgtgtcatgttcttttactcatgtcataacaaatttaaccttgcttaatatatatatcaaccctatggaataaatattacattcctatttttttaatgaggaaacttgaggtctaaggtctacttgcagctgtcacatgttggaatctggatataaatccaggtcttctgaattaaaagcccatactctaaatatacctttcataagtatttacacttaaataatatccactcgcagacttggtctttccacactaaagtcttacattatgtgtagtctatattaatgtgaattcactcatactcgctaatctttttcttgatttcttttgatccgtatttctttctgaatatacaataacaaaacctggttttccagccagtttgctactacattgtttcgcttaaggacaagagtctattgtattttgtttcaaatatttttcctcatgacatccaatatttcttctgattttttggtcacatacaaacagaaatctctaaaataattctgcctactttagatagtaagtaagagttaagctttgttgtctttgtcttaaacagaaataaaaatggaaataatctccaattgggcaagtgaagacttcctatgccattttcttcttattttcctatatgtggtattctttttatattatccattcgtaactagcatttttctacctgaaaaagtttgtaacatgcttctcatttcaaggaaataagagatttccctatacttcctcttcaaattcatttttttaagtgactagtcttagaactaatcccaaagaaccctctctgttaacactactctatttaggaaagggcctatttattcttactcttcagttttttaatccactgtatgatcaagaaatgagacaaagctagctaactggcttatagtcctatgactttaatctcttctacactgggctctaaattaattcttcagaaatcagaaaaactcattcaattctgtaacaaatgttcaatcctggtgcttaatatacaattatatctcatagtaatcttgctcacttaataataaaagaaaactggtttcttgtagtctccttagcaaatctcaactactgaatcctacttagagcatgtccactacatcatgattcaaaacattttaaaataacaatgtatactccagagtaattgaaggaaaatactttataaaaacagacctagtcataatatgccttaacatttaagcccaaaataaaatgcagtctaaatatcaacttctggtctcagtgatataatggcaaggttcaaaaatatcctaaatatcttctgaagcatgatatgccagtactgtcaagcaccaaacacaaagctagaagctgtgaattacaaaggtcttaaaacaaatttacaaagtgtaatcactcttcataggtgagatattctgtttattctatggaggaatatttcagtttaaattaaacatctgtatattttggtgtgtgttgcaataaggacacgccaagggaaagagaagagaatgtttcatcatgttcagcataatgcaagtataatatgaatttctgatagaaatattttcaagaaaatgaaatcactaaattaaaatttcatttaatattgatgccctttatcatcaaaaaatacctagacacaaaattacagattggcatctttttaaaacataatacttagcatactaattatattcattcagcaaagaaatcattaaaatgttcaacataaatcaaaagtatataatatcagtaccttgcaatagaaacatagtatttaaagctaaatgaatatatctttaatatttttggcataatttagtctatgaagctgggtaagatgataggtgactgaaaaactgaataacccctaaaaactaaacaaaatggagaattaatagaaatatcaataaagagtattaagatcaaaaaaatacttgcatcttgagatctgagaagtcatattctgaaatttgaattctgaagacgttaaaggtggaaaacatgcttgaaagtcatgtattaacttcttgtcattcctttgcagaagcagaaaatggttgctacatttttcaccctaagctgaagatgcttaaagtgataaaagttttaaagattatataccctcattgaaaatatgaaattttgtcttctgaaaaagagtaatattgctaacttttaattttgtcctattgggatgcacgtttgaacaggagagagagagataataaacaaaacctaaatactaaaatgaaagtgcccaaacacaagaataatcatattatgtcatttggtgacaataaatttgtgtcattttttaaaataaacatatatttccttcagttttatttataaccaataagatatcaagtaaaaattcacataaaaataaagttcacagttccaaacaaagataattttgatgatcagtttttgaaaacaaataacactacatctgttgagcacatgtttttgtcttgtgtgcaccttacataccagtctatgtctcaaaagcacataaagtttcaaggtaatacataattaggaattttcttaaatgtatcaaatcagaatcaataactggcaatttaaagtaatgacttgtcaaccataacacattttcaacactgtattagatagaatggcacagcagaaccaataagtccaatattcttattcattcaaattcttattcatctcttaatctatatatcatacaatattggttggtgatgcaaaagtcttcatatagaaaaacctagaaaattctcaaatgagcacttcttaggcctgcatatcacagaaccttgaaaactttaaaaaccaagagactaggaacctaaaagaaagaaagttatagataacactgatttttttaatagttttaaaacattttttaaataagatcacatttttttccagcgaagttggacttaggtttcttctagaactttgccttgtatataaaatgaacttgaaataaagggcttccaagttccctccaattctaaaacaatgcagttttatagtctttggaaatatcagaagttcccaacacacaaatggatttagtttcaaaagtttggaatgtactttcccatagaaacaatgatgccaataggagttagaaaactatgccacttcactcatagaatggctgagcactgaattataactaacaccagtttctataagaaaatattcattgagttttgtctggggaccccaagaacaaactgtcctcctgaccctcacaccccaaacaccccaagcaggaaagggacttcactgatgtctgcagcagcaatgctaagggccaagcaagagacatttagaaaagcttcgtccatcacatcttcaactggagccttgatgccatatccttttcctttttctacaaagttcctatcattggaacattcatcaacagttatagctatggtacttaatgtccacataattgctgaagagggaaagatttctgcagaagatttaaactgagtattgactagttaggaattatccttaacctaagccacaagcagagatatgtcaatgtttttataatacaatgtcttcataatgatggaatttgacctgcatattgaagggcagtagtacattgttagttttgtttgagatactgatgttcactcactgaatatatcatcactagatctttctaagaatggatatgctaaagaagattgtgcaagctcgtgaaaatatctactacatgatggtgtttttaaatgtatctacaaaatgtatataattagctgacagactaccctcccagtaaacccagagcagacattgtctaacagggaaagctattatttatacctatgccccaaaaatcaaataagcaaattacttatatttctttctttcttttttgaagcatgattcaaaaaattggtcttggccaggcacagtggcctgtagtcccagcactttgggaggccaaggtgggcagatcacttgatctcaggagttgaaaccagcctaggcaacatggcaaaaccccgtctctacaaaaaatacaaaaattagctgggaactgtggcccatgcctgtagtcccagctactcaagaggctaaggtgagaggatcccttgaccctgggaggcagaggttgtggtgatccaagatcgcaacactgcactctagcctaggtaaaagggtgagaccctgtcttaacaaaaaaaaacaaaaacaaaccaaaaaagtcttaattgccaaataaattaataatttttattttccataaatgcaacagttgggaattcctaagacctaggcattggttagcatgttttctggttgtaaaaattaccaaacactgattcaggaagtctatcagaagcttaatagacaagtctacaaccaatcaacaattctacctgaaaaaggcactgtgagtcaggcatctgtcaatatcttcttctctcaaaatatttggttagataagttatttttagtactttaggacatgacccaagcatatttcaatttctgcaacttcaatttgcaaatgttattttccatcttgctaggacattgttattttacagatcaccctcacatgaggggactattatcaattgtgaaagcacaacaggtgggtcacatcaaaggtcacaatagttttgttcacagggccagacataaggttttcattatccttaataaaaacagaagctagtaataaaaatataacattgaaataatatctctcttcattcatatgcaataactttacacatttgaatgtaccatttccaaaatctgctgctggcaataatagtatgatggttatttgatgtttgttataaaaataatggtataaatcaaggtcgcttccaagatggccaaataggaacagctccagtctgcagctcccggcgagattgacgcagaagatgggtgatttctgcatttccaactgaagtacctggttcatctcactgggactggttggacagtgggtgcagcccatggagggtgagctgaagaagggcggggcatcgcctcacctgggaagcacaaggggtcggggatctccctttcatagccaagggaagccgtgacagacagtacctggaaaaacagtacacccccacacaaatactgtgcttttcgacaatcttagcaaccggcagaccaggagattccctcccatgtgtggctcggcgggtcccatgcccatgaagccttgatcactgctagcacagcagtctgagatcaacctgtaaggctacagctgggtggtgggacggccatccgccattgctgaggcttgagtaggtaaacaaagcagacagaaagctcaaactgggcggagcccaccacagatcagcaaggcctactgtctctataggctccaccactgtaggcagggcatagctgaacaaaaggcagcagacaacttctgaagacttaaacatccctgtctgagagctctgaagagagcactggttctcccagcacagcgtttgagctctgagaacagactgactgcttcctcaagtgagtcactgacccccatgtagcctgattgggagacacctcccagtagaggccgacagacacctcatacaggcaagtgcccctctgggacaaagcttccagaggaagggtcaggcagcaatattttccgttctgcaatatttgctgttctgcacccaccgttggtgatacccaggcaaacaagatctggagtggacctccggcgaactccaacagacctatagcaaaggggcctgttagaaggaaaagtaacaaacagaaaggaatagcatcaacatcaacaaaaggacatccaaaccaaaaccccatctgtaggtcaccaacatcaaagaccaaaggtagataaaaaccacaaacatgaggagaaatcagagcagaaaagctgaaaactccaaaaaccagagcacttcttctcctccaaaggattgcagcttcttgtcagcactggaacaaaactggatggagaatgagtttgaagagttgacagaagtaggcttcagaaggtcggtaacaacaaacttctctgagctaaaggagcatgttctaacccatcgcaaggaagctaaaaaccttgaaaaaaggttagatgaatggctacatagaataaacagtgtagagaagacttcaaatgacctgatggagctgaaaaccacagcatgagaattgtgtgatggatacacaagcttcaatagccgattcaatcaagtggaagaaagcatatcagtgattgcagatcaaattaatgaaataaagcaagaacacaagaatagagaaaaaacagtaaaaagaaatgaacaaagcccacaagaaatatgggactgtgtgaaagcaccaaatctacgtttgattggtgtacctgaaagtgatggggagaatggtaccaagttggaaaacactcttaaggatattatccaggagaacttccccaacctagcaaggcaggccaacattcaaatgcaggaaatacagagaacaccacaatgatactcctcaagaagagcaaccccaagacacataattttcagattcaccaaggttaaaatgaaggaaaaaatgttaagggcagccagagagaaaggtcgggttacccacaaagggaagcccataagactaacagcagatctctctgcagaaaccgtacaagccagaagagggaggggccaatattcaacactcttaaaaaaaagaattttccacccagaatttcatatccagccaaactaagcttcaaaagtgaaggagaaataaaatcctttacagacaagcaaatgctgagagattttgtcaccaccagccctgccttacaagagctcctgaaggaagcactaaacatggaaaggaacaaccagtaacaaccactgcaaaaacattccaagttgtaaagaccatcgatgctatgaagaaactgcattaattaatgggcaaaataaccagctaacatcataatgacaggatcaaattcacacataacaatattaaccttaaatgtaaatgggctaaatgccccaattaaaagacagactggcaaactggataaagagtcaagacccatcagtgtactgtattcaggagacccatctcatgtgcagagacacacataggctcaaaataaagtgatggaagaagatctacaaagcaaatggaaaacaaaaaaaaagcaggggttgcaatcctagtctctgataaaacaaactttaaaccaacaaagatcaaaagagacaaagaagaccattacataatggtaaagggatcaattcaacaagaagagctaactatcctaaatatatatgcatccaatacaggagtacccagattcataaagcaagaccttagagacctacaaagagactcagactcccacacaacaataatgggagactttaacaccccactgtcaatattagacagatcaacgagacagaaggttaacaaggatatccaggatttgaactcagctctgcaccaagtggacctaatagacatctacagaactctccatccaaatcaacagaacatacattcttctcagcaccacatcgcacttatcctaaaattgactacttaattggaaataaaacacttctcagcaaatgtgaaagaacagaaatcacaacaaactgtctctcagaccacagtgcaatcaaattagaactcaggattaagaaactgactcaaaactgcacaactacatggaaactgaacaacttgttcctgaataactactgggtaaataacgaaggcagaaataaagatgtcctttgaaaccaatgagaacaaagacacaacataccagaatctctgggacacatttaatgcagtgtgtagagggaaatttatagcactaaatgcccacaagagaaagcaggaaacatctaaaatcgacaccctaacatcacaattaaaagaactagagaagcaagaacaaataaattcaaaagctagcagaagcaaagatataactaagatcggagcagaactgaaggagatagagacataaaaaaaaccttcaaaaaatcaatgaatccaggagctggttttttgaaaagatgaacaaaattgatagaccactagcaagactaataaagaagaaaagagagaagaaacaaatagatgcaataaaaaatgataaaggggatatcaccaccgatcccacagaaatacaaactaccatcagagaatactataaacacctctatgcaaataaactagaaaatttagaagaaatggataaatccctggacacatacgccctcctaacactaaaccaggaagaagttgaatctctgaatagaccaataacaggttctgaaattgaggcaatagttaatagcctaccaaccaaaaaaagtccaggcaaacggactcacagccaaattctaccagaggtacaaagaggagctggtaccattccttctgaaactattccaatcaatagaaaaagagggaatcctccctaactcattttatgaggccagcatcatcctgatgccaaagcttggcagggacacaacaaaaaaaagagaattttagaccaatatccttgatgaacttcgatgtgaaaatcctcaataaaatactggaaaaccgaatccagcagcacatgaaaaagcttatccaccacgatcaggtcagcttcatccctgggatgcaatgctggtacaacatacgcaaatcaataaacataatccatgacataaacagaaccaacaacaaaaaccacatgattatctcaatagatgcagaaaaggccttcgacgaaattcaacagcccttcatgctaaaaactctcaataaattaggtattgatgggacatatttcaaaataataagagctatctatgacaaacccacagccaatatcatactgaatgggcaaaaactggaagcattccctttgaaaactggcacaagacagggatgccctctctcaccactcctattcaacatagtgttggaagttctggccagggcaatcaggcaggagaaggaaataaagggtattcaattaggaaaagaggaagtcaaattgtctccgtttgcacataacatgattgtatatttagaaaaccccattgtctcagaccaaaatctccttaagctgataagcaacttcagcaaagtctcaggatacaaaatcaatgtgcaaaaatcacaagcactcctatacaccaataacagacaatcagagagccaaatcatgagtgaactcccattcacaattgctacagtgagaataaaataccaaagaatccaacttacaagggatgtgaaggacctcttcaaggagaactacaaaccactgctcaatgaaataaaagaggatacaaacaaatggaagaacactccatgctcatgggtaggaagaatcaatatcgtgaaaatggccatactgcccaaggtaatttatagattcaatgccatccccatcaagctaccaatgactttcttcacagaattggaaaaaactattctaaagttcatatggaaccaaaaaagggcccgcattgccaagtcaatcctaagccaaaagaacaaagatggaagcatcacactacctgacttcaaactatactacaaggctacagtaaccaaaacagcatggtactggtaccaaaacagagatatagatcaatggaacagaacagaggccacaggaataacaccacacatctacagccatctgatctttgacaaaactaacaaaaacaagaaatggggaaaggattccctatttaataaatgatgctgggaaaactggctagctatatgtagaaagctgaaactgcataccttccttacaccttatacaaaaattaactcaagatggattaaagacttaaatgtaagacataaaaccataaaaaccctagaagaaaacctaggcaataccattcaagacataggcatgggcaaggacttcatgactaaaacaccgaaagcaatggcaacaaaagccaaaatagacaaatggatctaattaaacagcttctgcacagcaaaagaaactatcatcagagtgaacaagcaacctatagaatgggagaaaatttttgcaatctacccatctgacaaaggactaatatccagaatctacaaagaagttaaacaaatttacaagaaaaaaaacaaccctatcaaaaagtgggcaaaggatatgaacagacacttctcaaaagaagacacttatgcagccagcagacacatgaaaaaatgctcatcatcactggttatcagagaaatacaaatcaaaaccacaatgagataccatctcacaccagttagaatggtgagcattaaaaagtcaggaaacaacagatgctggagaggatgtggaaaaataggaatgcttttacaccgttggtgggagtgtaaattagttcaaccattgtgggagacagtgtgacgattcctcaaggatctagaaccagaaataccatttgacccagcaatcccattactgggtatatacccaaaggattataaatcatgctactattaagacacatgcacatgtatgtttattgtggcactattcacaatagcaaagacttggaaccaacacaaatgtccatcagtgatagactggattaagaaaatatggcacatatacaccatggaatactacgcagccataaaaaatgatgagttcatgtcctttgcagggacatggatgaagctggaaaccatcattctcagcaaactatcacaaggacagaaaaccaaacaccgcatgttctcactcataggtgggaactgaatgatgagaacacatggacacagggcagggaacatcacacactggggcctgttgggaatggggggcttggggaagggatagcattaggagaaatacctaatgtaaatgacaagttgatgggtgcagcaagccaacatagcacatgtatacctatgtaacaaacctgcacgttatgcagatgtaccctagaacttaaagtataataaaaaataaatttaaaataatggtataaatcatgacttgacaaacaaatttctaaagcagttgtttgaactattaagttaaactgctgagtcacacacacaaaaaaattcccacaacaaactggtcccacagaatttatctaggtaaaaaaatttgagaactgtattcaacagcatgagtgagtttttaataacttgaattattaattaaacagaaaatcaagatgacttcagaaccagttatgcagctccatttaaattctgttgagctataacagaaatattcaatcctaatataacatgaataaaaacatttcttaagcacccccaatgctctgtaccattagaattcaaaagtttgttcaacaaacagattttattttgaaaactgtgatcaatgcagtgggttgttttctttttcagaatcagggaccagtaattggtaaatgattgctaatatttatattatccataactggtctactaactctacttctgaaaaactatggtactttatttccaaatcaagaacagtctacatacatacacttacacacacacacacaaacacacacacacaaatacacatgctgctattagaaaacttaaaaattaattaagtagtaacattaattgagcacctactaacaggccaggcaatgtacattattaaggaactctttatcttggaactctttatcttaaatgcaaataggtgtgtgccttcatgccaaccttagaagtgaatttaactaagcaaaattaaatgagcatgcaactttcttggaatacatttactgtgtagaacaatatataccaccatatatttttgtccaaactttaacggtaatatcacttttagaattttacaatatcaataatatgagcttctattgaaaatgtgaatggcaatgacataggcctttttatttctaagccagtaaaaaaaaaaaatcatcttcattttcttttagttctcagtattgaagtccccagtgatgacatgaaaaattttgtgtatcaaagaacactatcaagaaagtgaaaagacccacaggctgaagaaaatatttgcaaatcatatctaagtagggcctactacctataatacataaagaactcttacaactcaataatgaaaagacaagccaatttttaaatgagcaaaaggctgaactagtcatttcccaaagaaaacatacaaatggccagcaagcacatgaaaagatgctcaaaatcattattcattaggaaaatatgaatcaaaatcacaatttaacactcactaaaatagaaattagcacactcaatacattgctggtaggaatataaaatgtgcacatgctgtggaaaatagtttggcacttcctcaaaaagttcaacaggaaataccatgtgacccagcaattatgctgctatgtatcttcctaaagaaaacagttgttcaaccataaacatatatacaaatattcatggaagcactattcacaataactaaagggtagaaggatgtctgttgacaggtgaatagataagcaaattgaggtagagctacacaatgaaatagtattcgccaataaaaataaagtactaaaacatgctaaaaaaatggataaacttagaaaacatgctaagcaaaagaagctaaaaacaaaggccacatattgcatgattccatttatatgaaatatctagaataggtaaatccatagaaacagaaaaattattattgccctgggattgggggtgggagaaatggtgagtgactgcttaaaaagtagttttgggttttatcttgtttcattttgttttctggagacagggtcttgctctgtctcccaggctagagcgcagtggcattatcacagctcagtacagcctcagtctcctgggctcaacaatcctcccacctcattctccaaagtagctgagaccacaggcatgagctaccatgcctggctaattttttaaaactttcagagagaaggcatctcactatgttgactaggctggtctcaaactcctggactcaaggaatcctttcacctcagcctcccaaagtgctgggattacagaggtgagccaccacacccagccaaaaagtggttttgtttttggagtgatgaaattatttggaactagacactggtagtggttgcacaacattataaatataccaaatatcactgaattatgcattttaaattttctaaagtggtgagtttatgttacgtgaatattaccacaataatttttaaacttttttttaatgtacagtcttgcaaagaagcagaaaaatatgacccatgacacggagaaaaatcaatcaataaaaacagacccagaaattattaaattagcaggtacaatgttaaaacagctattaaaatgtactccatatcttgaaaaatgcagaggaaaacatgaacaaaatgaggaatgaaagatataaaaggatacagttaaaacttatagagagggccaggcaccacggctcacatctttaatctcagcctttaggaggccaaagcaggaggatcacttgagctcaggagttcaacaccagcctaggcaagagagcaagaccccatatcattttttaaaaactcatagagaggaagaaaataatatctaaaataaaaaaaacacactggattgaattaacagtagaaagcaatgacatagcaatagaaatgattgaagttgaagcagtgagagaaaataagaattaaaaagaaatgaataggccatatagtctaacatacatatgagctctaaaagagagaggaaagaaagtgaagaatacagccaaagctttccaaatttgaataaaactataaacccatggatccaaaaactttaacaaagtaaagtccaagcccaaaaaaaaaaaaaaagaacccacatctcaatagacacagaaaaggcatttgataaaattcaacacctcttcatgataaaaactctcaacaaactaggtatagaaagtatataccttaatgtaataaagtccatatatggcgaagccacagataacatcattctgaatgggggaaagctgaaagcctttcctctaataactggaataagacaaggatgcccactttcaccactcctattcactataatactgggagtcctagccagaacaattagtcaagagaaagaaataaaaggcacccaaattggaaaagaagaagtcaaactgaccaggcatggtggctcacacctgtaatcgtagctccttgggaggccaagccaggcagatcacttaagcccaggagttcaagactaccctgggcaatataatgagatctcatcgctacaaaaaattaaaagattagccaagtgtgatggtgcatgcttatggtcccagctactcaggaggttgagttgggaaaatcacttgagcccaggcagttgaggctgcagtgagccatgatcatgccatcgcactccagcttgggtgacacagcaggactttgtctatttaaataaataaataaatactcttacctctaataaagaagttcaataaagttgcaggatacaaaatcaacatacaaaaatcagtagcaattctatgcaccaaaaataaactagctgagaaagaaaccaagagggcaatcctatttacaaaagcaacaacaaaaaaaaatacctagggaataaataaccaaggaggaggaaagcctttaccaaaaaaactacaaaatgctgatgaaagaaattgaaaaggacataaataaatggaaaggcatcccatgctcatgtattggtagaattaatattgttaaaatgaccatactacccaaagcaacctgcagattcaatgcaacccctatcaaaataccaatgtcatttttcacagaaatagaattcaaaatatttaacatatattagaagtcaatagtaaccaaaacagcatagtattgatatagcaacagacacacagactcatggaacaatacagagaacccagaaacaaatccacatatttacataaatccactaattttcgacaaaggtgccaagaacatgcactggggaaaggacaccctcttaaataaatagtgctggaaaaactggatatccatatgcagaagaataaaactagtcccctatctctcaccatatataaaagtcaactcaagatgaattaaagactttaatataagacctgaagctataaaaccgctaggagaaaatacaggggaagtgcttcaggacacgatctaggcaacgaattttatagctaagacccaaagcacaggcaacaaaaacaaaagtagacaaatgggactatattaaaccaaaaagcttctgaatagcaaaggaaataatcaacagaatgaagagataacctgtggaatgggagaaaatatttgcaaactagtcatctgacaagagactaacatccaaaatatacaaggaattcaactgcaaaaccaaaaaataataatcccattcagaagtgggcaaaggacatgaatagatacttctcaaaagaagacatacaaatggccaacaggtatatgatttttaaaaatactcaatatcactaatcatcaaggaaatgcaaatcaaaaccacaatgagatatcatcttgccccagttagaatggctattactaaaaagacaaaaaataacagatgatggtgaggatggaaagaaaagagaactcttatacactcttagtgggaatgtaaattagtacaaccactatggaaaacagtatggagatttctcaacaaactaaaaatagaacaaccatatcatccagcaatcttgccactgggtatttttccaaaggaaaggaaatcagcatgtcaaagggatatctgcactccctgtttactgcagcactattcacaattgtaaagctatggaaccaacctaggtgtccatcaatggaagaaaagataaagaaatatatatatacaaacatatataaaagtatatgtacacacacacacacaatgggatactattcagccataaaaaagaatgaaatcatgtcatttgttgcaacatggatagaacttgaggtcattatgttaagtgaaataggccaggcacagaaagacaaatactgcatgttctcactcatacgtgagagctaaaagaggttaatcatgagaatgtcgacaagagattaggaagaatgtgtgattgggagggtgcagaatgagaagttggttaatgggtacaaacagagagacaaatagaaggaataaattctaatgtttgatagcaaagtagagtgattatcattaacaacaatgtattgtttatgtcaaaatagaagaaaggattgaaatgttcccaatacagggaaatgatcaatacttgagatgatggatatcctaaacaccctaacttgatcattacacattctatgcgtgtaacaaaatatcacatggtaccccataaatacgtacaaatatgtatcaacagcaattgtttttaaaaataattatgaaataaaagaagatgcaaggaaaataataatcaaatttatggaaaacaatcataaaaagaacatcttaaaagcagccgcatggggaaaaattaaacaatacatataaaggaacaaaaatgagagtgacagcagactcttcattagaagatatgcaagctcaaagaccataaaacaacatctttaaaatactggagaaattaaaactgccaatttagaatccgtttaggcaaaaatatctttctaatgtgaaaacaaagactttttcgacaaataaatgtttagagagaattcatcagcagcagctctacactgcaaaatatgttaaagaaagttctttagatggaaaaaaaatacagaatggcaatgtagatttatcaaaagaatgaagagtgttagaaatggtaactataagggaaactctaacagaaaatgttctcaatttttaatatcttcaaaagatagtcgtgaataattggagctccataggcaaaacaaatgatccctgccccttccataaaaatgaagccacaatgggccatagacctaaatatagaacataaaactataaaatttctagaagaaaatgtatgagaaaatatttctggccttggcttaggtaaagatatctcaaatgcatactctgtaaaagacaaaaatttaaaaattgaactgtatcaaaattaaaaattttggctctttgaaagacacttaaaatgaacgggctgggcagggagtaggaggatgggaagatgttggtcaaaggatgtaaaatttcagttagtcaggaggaataagttcaagagacctattgtacaacatagtgactatagtcaataacaatatattatatacttgaaaattgctaaaagactatattttaagtgttctcaccacaaataaatgaagtaaatttattttgtatgtgaggtaatttgatttagccattccataacgtatacatatttcaaaaaaaatgaaatcacaaacccagtctaggagaaatatttgtataaaataatcacataaaggatttatatctggaatatataaaaagctctttcaatttaattaaaaataataataaatttgaaaagacattgctccaaagagacagagatgacaaataggcacatgaaaaaagtttcaaaatcatttagtcattagggaaaagcacatttaaaacttaatgagatacagtactaatagaagtctaccagaataactaaaaaaaatttttttttgaggcggcatttcactcttgttgaccaagctggagtgcaatggcatgatctcggctcactgcaacgtccgcctcccgggttcaagggattctcctgcctcagcctcccgaatagctggtattacaggcatgcgccaccacgcctggctaattttgtatttttagtagagacggggtttctccatgttggtcaggctggtctcaaactcctgacctcaggtgatttgcccacctcggcctcccaatataactaaaattttttaaatgacaataccaagtgctggtaatggtatagcacaatagagcccatgctgatgagaatacaaaatggtgcagccattgtggaaacttctttggcagtttcttgtaaaacactcatttatcatccaacagagtaatccaatgcctaggtttttacccaaaagaaatgaaaacatatgtccacacaaagacctgtatgcaactcagcaactttattcacgatcaccaaaaactaaaaagaacccagaagaccatcaactggtgataaaaaaaacaaattgtcacacatccatatattggaatctactcagcaaaagaatgatacaaaatactgttacctacaacaacatggataaatcttctttcattacgcaaaatgaaagaagccagacacaaagggctatgtacgtactttatgattccacttctatgacattgtggaagacataagcttgtaaagacagaaatatgaacagtggttgtcaggggtatgagtgacaggctgactacaaaggggcatggaaagcctttggagatgatgaaaataatctatatccttctagaattagaaataccatttgacccagccatcccattactgggtaacttggaaccaacccaaatgtccatcaatgatagactgaattaagaaaatgtggcacatatacaccatggaatactaggcagccataaaaaaggatgagtccatgtcctttgcagggacatggatgaagctggaaaccatcattctgagcaaactatcacaaggacagaaaaccaaacaccccatgttctaactcataggtgggaaatgaacaatgagaacacttgcacacagggtggggaacatcacacaccagggcctgtcttggggttgggggaaggggagggatagcattaggagatatacctaatgtaaatgacgagttaatgggtgcagcacaccaacatggcatatgtatacatatgtaacaaacctgcacgttgtgcacatgtaccctagaacttaaagtataataaaaaataaaaaataataataaaaaaataaaaaatctatatcttaagtgtggtggtagttgcatgttatatacacgtataaaatgtctatcactgtgttactaaaaagagtgaatttcattgctctaaattataccttaattaaccttatttttaaaaagataattaactgcctaaagcaaaaaccgcaacagtgtactgtgggttttctgacttatggcaataataacacaaaaagcagtaaggaagaaagtgaagtatattgttgcatctatggttcttactctatacattaagtaaaataatattatttaaaggtagactgtgatgttaaagatatttattgtaaactttaaagcaaccataattaaaaagtatagctatttaaacaacagtggagctgaaacaaaaattttaaaatatactctgtagatgaaacaaataggaaaaaaataacaagatggtaaattaaggccaggcgcagtggctcacacctgtaattccagcactttgggcggcttaggtgggaggattgcttgagtctagcagtttgagaccagcctaggcaacatagtaagaccccaactttacaaaaatattagccagatgtggtagcacacacctatagtcccagctactcgtgaggctgaagcagaaggatagcttgagcctaggagtttgagaccagcctagacaacatagtgagacaccatctttaaaaaaatttaaaataaaaaattagctgggaatggtggcacacacctgtagttccagctactcaagagctgaggtgggaggattacttgagcccaagaggttaaagttgcagttagctgtggtcacgccactgtactcagcccaggcaacagagtgagaccctgtctcattaaaataaataaataaataatgttttaaagacgctaaattaaacccaaccatatagataattacattaaataaaaagagtctaaacactataaataaaaggcaaagattttcagattgtctccaatctacaagtcacacattttaaatagattcacagcatgtgacactcccctatttggtgtagatgccataatatttataattatggagttaaacttcaggcagtaaaacaaaagtaattttaatatgaaaaaatatatatatttttttgagacagagtctcactctgtcacccaggctggagtacagtggtgcaaccttggctcacttcaacctccgcctcccgggttcaagcaattctcctgcctcagcctcctgagtagctgggattataagcatgtgccaccatgcccagctaatttttgtatttttttagtagagatgggtttcaccatgttggcaaggctggtcttgaactcctgacctcaggtgatctgcccacctcagcctcccaaagtgctgggattacaggcatgagccaccatgcctggcctgaaaaatttattcaaaaacaaaattaatcaaacaaaatgttttatgcatgtcttagattaacaattcaaagggtattcttgaccatttttaacaaaatttataatgtacatttttcttacacatctataagatacatcttctattttcccaatttttcatattttattgaaacccaaatattgtatattgtatacagacaaccactatagtaatgcctaaaattttttccaacattctaaacattaacatacacggcccccaaaaaaattagtactttttgacaaatcataaagtaaaacacaggagttaagtgttcctttaaaaaaactctctgaatcataaaaatccaccaagctaaaatcaaaaaaggaaaatgcatgctgtatagccgacattttaaaaacaaagtccactataaaaacttaaatgtgggaagcaaattctccagactgaaagtaagatgtatggaatttacaaaggtcaccctcatttcccccctcccaaataatgcatgcaatcaaaatatatttcactccatgggttaatgtaggttttttcttttgtttggaatctattcacactttaagggtctattggtctgggcaaatgaataaggtaagccaaacatttattgcatccagcaacaattagagccttccacaaatgaaagcaatttttctaaacagtagtaacaagatattgctacccatgacacttaataaaggaatatgtactttaaattgcctaatcctgggagttacagaagtgaggttcaggtctcacagcataatagaggtttgggattttttgtttttcttttttactaaaagacttatataacattcctaaaagttatcaaaggagatctaaaaggttagaatgagattatctgtgccataaacaattatagccttcctctaggctggtactcataagtaagtttgatttggtaaatattacataagtctgacacagttggagaaccaggaaaattaaaatggcattgtataatacctatcttgaagtgagtaacaatctctcatagatatgaaattatttgataaataacattatgggaatatggaaatcatttttgatataagtattacattacataataaaaataattattgatcattaatgtcaactaaaggaccgaaacatggactttaaacccaagaatttatcatctaaaacattttctttttttataactttcctcctagtaatgcaggacaagtgagccccaaaactggggcttagcagaagttcttggctttggctaggaaagaacttaaggttaagttagtggtgttagatagcaacatttgcttgaacggtactgctccttgcagagcaggctaactcataggctgtgcacccaaagtcagctaagtatgggctgttggcaactgtatttatactcatgtatatccactttcaattatatgcaaattaaggggcaggctgatgtgaattgacaggcaggttaattagaactttctagaaaaggggcagtaacttccaggtcattgccatggaaaggagtggtgacttcaaggttgttgccatagcacttataaactgccatggggctggtggaagtgtcttatgctaatgaacaatgagggcagccagggatcacttttgtcaccatctgctgattttggccatttttttttttttttactttattctgtctggacccggtgtatataaatggctacaaatccagcatccatctctccctgtggagaccatacctctaaagaggcattgatactaggaccatctaacatagattggtgctcctaactccaaacagaaccaggataaaattaacagtaaataaaatgacaagaaatgcataaagacgggatagatgagtttcatcactgaattatgaactttattattcaagtcctatgccagtcctaaattccaacaccatttcatcaacaaccttattaaaaagatgaaaaatagaccactttctctcaccagtgaatgaccttgattcttaaatataacatatatgttacagagtatttgaagtgtcttaggatggtcaacgcggcagtttagaaagtggtaggccctactaggagggggtactcagtccattcaaaaagaggattggtcatagggacctatagtttcaaaagaaaagataataaatatggtaatagtcatcatgaaagctttctttgaaatactgtatgcaacttgagtcttgttattcccaacactacccaacaaaaatgagcagaaggaaaaattgagtcactgtgaactaataacaaaaatgcttaaaaccctttgataacaggtttctcaaagttataccatgttcatgctcagtagaaaatcatatttctgttcgttattagtctgggagggcaatgcatcagccaaaacaatcacaacagaatgacctggaatttatcactttgtccaattaacttaggttttttcccctttctttcttctctcccatcctattttcctttattcttacaataactactatattcccaccatgtgccaggcacaacactgcatactgggtaagaacagttaaaaagacatagtccctgccttcatgttgttcacattaggttttattccaaaagcagcaactgtggcagctaattatatagtgtttcgtccaagtctctgtaatgatctcccaaaaattactcaaaaccttccttactctcttaacaattgaactataccacaaatgtgaaggatttctggaaatatgaagcagtcataaacatattaagttccttttgtccttctgctatttcttataaactattagaattaaaattaaatctttcgagaaggaggtcagtctgaactgttccaataaatcttacatgtgatgaaaacaggaaaggggaaagagagagacgagcaaagaaaaaaaacctttgtacctgccaaaagtcagcaattgtgtgatctcttacaaatcagttgttttgcatgtagtgatataatgacaggggaaaaagtaattataattaggtacctattttgattcctctctccatagtatcagtattgaatgtcatttgattttggcaaaagataaggtcattgactacttaaaagatgtacaagactacttctctaaatgtttcacatagaaatatctaaaaatggaaaacatctcaatctcaatcacatactagccagcaggacaatttgcaaaattcacagccaaaaataaataaacaaacaaacagaatctgtggcctcaatgacacttaaaaaattcaacaatatggaataaaaaagaatttttaacttatacataaaaaacatgacaatgctatgaaaacttactaaatcattcagtgtgtataattagtgaatctaaattaccactaattagctgaacatctaacaacataactacaattatttctttcttaaaattatttttgctcaggtgttatcggtatttaagtgtttcttaaataaaatatattatcattattattacatataatgtctttaaatttttattaatgtataataattgtgtatattttgggggtacatgtgatattttgatacctgtatacaatgtgtaatgatcacatcagggtacttcaaacatttatcttttctttgtgctgtgaacattacaaatcttctcttcttgctatttcgaaatatacaataaattatttgtaactataatttccctgctatactattgaatacaaaaatacaattagaaggaatacatataaagtcttggacacataaacatttttatcagagaattccatccaccaaagttaaatcactgcaaaagaaatagagatataatgaatatattaataagcagaagtgccttccaccatatgtgcccttgactagttacataaatatgaacaaattcatatttaccaataatccaataatccaataatatattttgttaagtctatatccagataattcttttcatataaatatttctcctcaagattctgatcttgacatcttgattggaaaaactgacataccacttctgggttttttatatttttatttttatataaaaggaaaacaaaagtctgtttaattaaaaatgaggacttacacaaaagaataccatagctcttaattatattctagagtaactcacatctcaagcatctaaaaaaagtccttaaataaataaacaatcatcactagaaacagactatccagtaacacattcaagttgccagaacggctggagatattactcagtcataattattagaaattcattacagccatagcctacaaatgagaaataaagcaaatcgaaagtgctgatattctacatccccaaacaaacaacactctcagtaaaatctgaataaaataaatggaaatatggcctaaagctgtactaaattattatatgttcataaaactaccagcaatgctaatctaactcatttttatctcagaaaacatcacattttccacacttcctcccactaaaataaaagtgcttcaacttcgtcccttggcccaaatattcaaatacaattaaaagataactgtggcatcctctttatagaaatagttcaaatataaccacagaatcacatgcagaagtgagcattaaaacattagtttttaatttaagaaaaatacccttaacattttctatgttcattaaaatgtttaacatttcagattgatgaaatacccagcatcaagccatgtagtatggcttcactttcatcaaataacattttataatcataaatttactttcattcaaattgctgctaatatttaaacattattgttcttgcactttgttctattgcttttgcatataataaagagcatgaaaagttaattcataaaatacggaaggcacaaattttattctgtagaccaataacgtaacgatttatagcccaattcataggtcttagctgataatacctctgagatcaagttaagtagcttcagaaatttctgactttataatccaccttttctttattcttacataccataacttcattgccacacataggtttcctttttcaatgtcagttaaatgtcttccaagcttcagaagcccaagacttctgatggtattttcaaaatgtggtgtttccctttagtcttattaaatactttgatcacaattagtaaatacaactatagtttctcataaaatttcatctctccaccctaacttcacttaaatactggaaaatgttatcaaacatgtcaaaagcctcttgagtataattaaagtttatgcatatatgttcacatgaagtgtaaagatggacaaagtaaggttaggaacttttccatatggcatctgtattgcattttacaaatttctgaaatgcttactcttctccaatttgttcctagctctttcttctccctatctcacaccctaaactcccctctagaaaatgtactccacattaaatggatccagtaaactcattcccacattcaactttcttctggactatacaccatcctctgaaatgtcctccccggatagtcccagcttatcaatttacctttcttttgtaaagtttcttctgacttaattaacatagtgctggtaatctccaatgagagttaatctaaacataaaattccatgactcttttgtttaccattctgtaattacttctttgcttatatagaatattcttaggtatctatttcaaatatccatatttctcacctgcaactgttaactttataattataaattataatattagcaacattgttattctttattattattgtaaatgataatatcagtaacattcttatcaccattattagctcctacaagtctatagaagtattttgtgtgtaaggcagcacaagaattgttcctttttcagatcaaagtatcaccttatatttgggatgattaaaacatttgataagcccttttgttacatagctacaacataatggcttataaaggccaacttaatcatatgattagctcaattttactaaagaacgctgttaagtttcagatgctggctctgtccttaagaagtcaaaacacaatttgaaaaattagccaaacatctaaaatattttttctctacaacttttccaactatcaagaacttttgagtgtatctctaacttaactagatgttctagcatcatgtaaatggtctctgaaactaaagcaggaagagatatcttggaagaacattttcctgaatagtggtcatagtaggactaggatagctctataaactctgattgctggcaaaaactttaagatattcaagtaatttattctcaactctccaactccctgccttcataaaccaactgtcctgggatttacctggaaaacttccttgacatcacctggaaatttttaagccttcaatctgctaaatattctccagaaagacattctgcctctttctgtgcccagtcttcaagagatgccaagaattactctcataccattcaagtcctgctgaccagggcctaagtggaaaaggtaatttacaaagaacgaagctattcactatgaactacaatcactgctctgcaaccaagaatttagtcaggtgtatcatacatccctttgagaacttttacccaaagcagaaacttaatttcactaatatctcttctttctcaagacttccaacattctaaatacgaaggagttgtactctagtaaactgagaaggcaaggttaaggccctcatttttcaactatgattagaccaatgctctagtccaaggattgaatgaactagttgtgaaacctaacccttatgagcaaactcacctgttcagcagtacagtaagtgtactctcctctgattttccatatggagggccaatttaaaaaaataagaattctcaactaaatagcagctttttctttcaaagtaaaaaacaaagccactctcacagtgcttacatttgcaatacatctgtaaaaagtgattttttagcatcggaaagcattttaattgtagtaaactgaacaatgcagaaattgtttgaagattaatgaaattcacaaacaaccctttttagaaagtaacaacaattttttcaacattaaagaggagctcattatatcaagacaactccactgtaaaaagcagtctgacttcaatcactgcatatctacatgttaatgaacttgctgtatgaagcagggagagaacagaaaaagtaataggaagactgacttaatgtatatttgctaggaaaaaaaatctcctttaatcaataaaataccttttcactagtatcataatggtatctgaaactctttcaaacatcacaaaaggaagatgatacttgaaagtttctttaagacattacacagttcacactttcttgcagtgttcacatactgtcagcatcacagttctaaagactttcaagtttcaacagacagatacaggctagtacaaagtctttgccataaaaatctcgttgctgccccctgatcaaacacagacaaatctgaaactgaaaagtgggaaccaaccagtgacctttgattggaaccacaagcctaggttttaataaaatgcctcattcattgctctttggtgccaacaagataggtgtgttatagactgaaaaaagtactcaatacaccatttacacctatacaatgatttccattattcacccttggaatttgtgattgtagcaagtgagacacaggtgtcttaaaatggcaaaacccaaacacaaaaatgcacatttctacctttaaaataaagaaatgactttaccccttcctctcattttcttgctactggttttcatgccttattaattgtattgtaccagtctttccaaaaccgtaatttgcacaatatttatttgttgctattcctcagggcctaaggaatgcggcaatattcacttttgaacccctgattttcctagcatattaatgcactattcaaatattcaaatgcatttctacaaggcctattttaattaaaccaaatgtttgaaatttttggttattttattttgccattttgggggagggccaagaaaaaaaagggtgtcagactacaaccatagttagcacattttgatgcctaatgtcagactgcccttaagagcaatggctcaagaaaatgcaaatcaagtccaattcttatgagttaaatgctgggaatgaaagaaagggaggaaatgttttcaaagccaatgcattcctaagtgttatggtggatgcacacaaggaactgttaaccccagttaaaattggaagctagaatggtgagggacctgcaagctctatagtgcatgccttaatgacctctacaaaccatgacactaaaatattctaactcttactctaagactaaagggcttcacgtgtaattgacagtgttattctagtgcctagcattatgcctaaaatgtagcaggtgccttgtattacatataaatatgtaaatatatacatatatacgtacatatgtttatacgtacatatatgtttatacgtacatatatgtttatacgtacatatatgtttatacgtacatatatgtttatacgtacatatatgtttatacgtacatatatgtttatacgtacatatgtttatacgtacatatatgtttatacgtacatatatgtttatacgtacatgtatgtttatacgtacatatatgtttatacgtacatatatgtttatacgaaaatgtatacataaataaaatgaataatgaagtgtggggctacaactttgccaggatgaaaggacagtatgaattgtaaactcaatctgaggaaacaatctacctacaacacaaactggaaggaaggaaggtaagaaagaaggaagaagtgccattatttcatttctttttatggctgagtagtattccattgtatttataaaagtgaagtaactcagaaatggaaaaccaaatatcatatgttctcacttttaaggtgtggtaagctatgaggatgcaaaggcataacaatgatataatggtctttggggcttgggggaaatatgggagtcgggtgaggaataaaggactacacattggatacagggtatactacttgggtgatgggtgcaccaaaatctcagaaatcactactaaagaacttatccatgtaaccaaaaccacctgttcccaaaaaactattgaaatattaaaagaaaaagaaggaagaaagaacggcagaaataaaggggaggaataagaaagggaataagacaggaagggaggagaaatcatgtacagaatcatgttgtctgtactacaactaagtattcctatctaccctcctgatggagggtagatccactgcctctgggcaccacagtgggctcagtagcctgaactgctcctgtgaatgaccacagctatactgcttcacctactgtaaataaacatacacacacccacaaacccagacacctcctaagatatgaatgtaagtatttagtttagcccaacagaagactcatgacttcattcagttgccaaattacttgacccaaagaattcaaaggtcatgagggcagggactttctctatctcatacatggttatatcccctgacttagatcagtgcctgactagaacaataggtatttaacaaaaattgttctaaaactgatattgtcaacattaatattttcaagtccctggacagattatagtttatggcaggagttttcaatgtatggtcatgaaacctccaggggttaccaagactctttcaggggtctaattttttcacaataaggataataatgttatttacttttctttaatagatggtctctcactctgtcacccagattggagtgcagtggcgcgatcatagctcagtgtaatctcaaactcctgggctcaaaagaacctccacctcagcctccctaggagctaggactacatgtacacatcaccacacctggctaatttttttttttcatagagacagaaacttgctatgttgcccaggcaggtctctaactcctgacctcaaactatccacccgccttggtctcccaaagtataaggattacaggtgtgaaacatggtgcccagccccttatttgcctttttcactctaattctcacaagtatacagtggagttttccagaggttatataataatgtgattcctctgaagtctaacatgttcttgtgtttttaaaatttctaatatgaagacttccaattccgggaagatggggcagaagtacttttccccattccttccccaaaacacaactaaaaaccctggacactgtatataagacaaacataagaggactctaaaaagtggaaagaagacaggctggctaggaaactcagaaccaaggaatgacactggtgaatttcctaggttttcttttcgcgttgtgtataccagacttggagctaaagaagccagcaacctaaaaacatcaatagatacagaaaaaaagtcccccaaaaaagtttgctctctctatcccaaggaccaggaaagaggcagcttttagtaagacaggaaacttttagacactatcttttctaactccagataaacactggagaaaaaatactatggctccaccctgacccactcaaacctagtggtgaacctagaattccactctctcacggctttaatgaggtacccaatacccacccccggaaatgtcaaagaaaaccaggtagtcatctgggacttttacccccaccagccagtagcatccccatacctgcacctgtccctggccccagtgaccctcccacttctcccgcagaatggtatcaaggaatgcctagtggagagtcaaaactttcatcattgaccaacagtaatgaggccacctctgctaagatgtcagtgaagaccacatggggagctagaactccccatccagcactacaagaagccccaccacccagaggaccatctgaacttccatatccatctagcagtaacaaggtagcagcctcccttcccttactgaaccagtgttaaggaaagctagctaaaacaagtttacaaaagaaccagagtgtcataataaaaaacaaaaatatatggatttcaagcaaaaatcactgtcataccacaaaagatctcaaattaaatgaaaaagataaccaatagatgccaacaccaagatgttagaataatctgacaaacattttaaagcagccatgataaaaaatatataaatgagcaattatgaacccatttgaaacaaatgaaggaaatagcctcagcagagaagtagaaaacataaagaagaaccaaatgaaaaaaaaactgaaaactacaataactaaaattaaaagctcaatagtaaattttttaaaatagctggttcgggttggtgcatgcgtttagttctagctactcaagaggctgagacagaaggataacttaagcctgggagttttatgctgcagtgtgctatgatcataccactgcactccagcctggatgaaagagtgagaccctgtcactatttaaaacaaacaaacaaacaaacaaaaatagaagctcaatagaagggctcaattgtagaatggaaagcaccaaatcagtgaaccagaagacagaacaatagaatatatccaatctaaataacagagagaaaacagacttcaagaaaatgaaccgaatgtcaggaaactttgaggatatagcaaaatatctaatattcatgtcctcagagtcctggaggacagaagaaagacagtgacactgaaaatgtactcaaaggaataataattgaaaacatcctaattatagtcacatacatacataaacctacagttgagcaaatcccaagcaggataaattcaaagaaattcatgcaaagatacatcatattaaacttctgaaaactaaaaacaaaaaaatcttaaaagcatccaaagaaaaatgacaccttacctataaggggaaaataattcaaatgacgcagatttctcatcagaaaccatagaagccagaaagaagtggcacaatattttcgaagtgctgaaagaaatgactagtcaacccaaaatcctatacccaatgaaaatatcccttagggatgcaggggaaatcaaaacattctcaaatgaaggaaaatgaagagagtttatcaccagcagacccactctaaaaaaaatgactaaaggaagttctctaaacagaaaggacaaaataaaagaaatgttgaaacatcaggaaggaagaaagaataagagaggcaaaatataatagtgtgaataaatacaataggatttccttctcctcctgaattttctaaattatgtttgatggttaatgcacattgcctaatgtggttctaaatgtatgtagagaaaacaggtaagacaattacattataaacagggaaagtaattggatataaagggaggtaaggttcttacacttgatgcaaactggtaaactgactattccagtagtcaaagattgatagaactggacagacagaaatgatacagaagaattaaacaatctgatcaacagaatctaatcaacattcatagaatactccattcaatgacagaatacacatcttttatgtgcccctagaacatataccaagatagacaacaaactaggccataaaacaaaactcaacaaatttttaaaaactgaaatcatacagagcatgttctctgaccacaatgggattaaactggaaatcagtaagaaagaaagaactatctccaaatccttggaaactaagcaacacacttccaaataatccatgagtcaaaaaaaattttcaaaagaaatttttttaaaaaaagaaacactaaactaagtgaaaatgaaaatatatcaaaatttctgaggcatggctaaagcagtgctgagaaagacatttataacactaaatgcatgcataagaaaagaagaaaaatcttaaatcaataatctaaactcccatctcaagaacccagaaaaacaagagagcaaaattaacccaaagcaagcagaaggaagaaaatgataaagagcggaaaccaataaaattgaaaacaggaaaacaatagaaaagtaaacaaaacaaaaaattggttctttgaaatgatcaataatattggcaagcccctatcaagactgacaaagaatgagagaaaacacaaattaccaatattagtaatgaaataggggatatcattacagaccgtgcagacataaaaaggatagtaagtgaatactagcagtaactctacacacataaatttgacaatttagatgaaatggaccacttgctcaaaaaacagaaattactacaattcactcaatatgaaatgacatagttaatttgaatagccctataactcttaagaaaattgaattcttatgtttaagtacccccaaaaagaaatccccaggcccaaatgtctaccaaatgtttaaagattaacaccaattctacgcaatctcttccagaaaacagaagagaaggaaacactacccaatttgttttacgaagctagtattaacctgataacaaaaccatactgaaacaaatatgatacaaaaaaaaaacaaagcttcagaccaaaactcctcatgaattctttttttaaaagaacccacaaacaagtatccacagtaaccccataacacactctcttcttgacagacaaaaataattttaaagcatggcacatgtatacatatgtaactaacctgcacaatgtgcacatgtaccctaaaacttagagtataataaaaaaataaaaaaataaaaaaataaataaataaataaaaaaaaaaaaaaaaaaaaaaaaaaaaaaaaaaaaactcgtcaacagaaagaaattccaatgcagtaaatatcaattgaaatagaccacataggccgggcgcagtggctcacacctgtaatcccagcactttgggaggccaaggtgggcagatcatgaggtcaggagatcgagaccatcctggctaacatggtgaaaccccgtctctactaaaaatacaaaaaattagtcaggcgtggtgacgggcgcctgtagtcccagctactcgagaggctgaggcaggagaatggcgtgaacccaggaggtggagcttgcagtgagccgagatcgggccactgcactccagcctaggtgacagagcgagactccgtctcaaaaaaaaaaaaaaaaaagaaatagaccacataagcaaaagctttgggggttccaaataattttaaagaatgcaacgagatcctgggaataaaaagtttgagaacctctgatttaggccactagctcctaagtttactaatggtcacctaaagtgctacagcagaagtcttcatgaaccttctgaaatgtgagcaaaatctctttaggctcatcttcaaagtaagtccagtgaagatacaaaaacaatgctaccaaactttgaaatatttaactttcataagtcctgggggagttagaatcctgcccttgtgacaggagattctgggcaataaacaataccatgtagtattgaaatttggtcagccaagaggtatctctggtaaactcaggataattcctgctaagggaaaagaaataggttgagtcagctaagcctattgtatctcatctatcagaaactcagccaaagcattattgccctatggttttcagagatccccagctctttaccgtcaagaaataggcatcaaaatagtatctgacatacccgctagggcggctataatgttttttaatggaaaataagtgtttgcaagaatgtagagaaattggaaccttcatacatggctcatggaaaggtaaaatgatgcagctactgtggaaaacagtttggcactttctccaaaattaaacacgggactttcatatgacccaattccactcctaggtatatatgcaaaagaacagaaaataggtgttcaaacaaaacttacacacaaatgttcataggagcactattcacaatagccaaaaagtggaaacaacctaaatgtccatcaatagatgaatggataaccaaactgtggtacatatcatggaatattattcagtaataaaaaggaatgaagtgcagatgggacatccctaatccaaaaatctgaaatccaaaatgctccaaaatctgaaacttcttgagtgccaacttggcactataagtagaaaattccacacctgacctcatctgacaagtcatgttaactctacagaaaaaaaatacctatagatggcagagtgaaaatgtgtggtgggcttattgaagtacaagagcagcacacattcataacagaataagaaatcatctctgtttataaaatcaaagagagacttctaagacaaaaaccattgttaacgaggcagatgaccgtgaaggaaatatttttaaaagccaaccagctcatccctagaggatcctcttcctagtccttcaactgtttcttctcacctaaaaaaataaaatacagtatacagtaacctttcaatcaaaacacaacataggtggagactgccacggttggtggccattgttgtttaacaactgacacaggtattatagtgacgctactgtgctgcttagttaccctaaatacattgtttctctgtattaatggtatgtcatatttttttctttttttttttttttttttttttttgagacggagtctcgctctgtcgcccaggctggagtgcagtggcgatctctgctcactgcaacctccgccttctgggttcaagcaattctcctgcctcagcctcctgagtagctgggattacaggtgcatgccaccacgcctggctgatttttttttttttttgtatttttagtagagacggggtttcagcatgttggtcaggcttgtctcgaactcctgacctcgtgatccacccacctcagcctcccacagtgctgggattacaggtgtgagccactgcacctggccatattttttttttttttactgttaagaacttatgtgtgaataagtataagaaaatgattgcttaatgataccacataaattcagagtcaggaatgacagtgatgccaaacaaccacagactgtccacatggatggctaagatagtgacactttcgctttctgatggtttatgtacacagattttgttccatgcacaaaattatttaaaatagtgtaaaaaattaccttcaggctatgtgtataagatatatacaagacataagtaaatttcttgtataggcttgggtcccatccccaagatatctcattatgtatatgcaaatattccaaaataaaaaaaaatccaaaattcaaaacacttctggtcctaagcatttcagataagggatactcgatctgtagtgatgtgctataaaatattaatacataaatttagaaaacattacactaagtgaaaaacagccagacacaaaaggttatatattgtatgattgcatttatagaaaacatgaagaatagaataaatcaacagagacagaaagcagatttggggagaagggaggaatgaggattaactgcttagtaggtatggagttttcatttcaggtgatgaaaatgttttggaacaagataggtgtgatggttgcataacactgtgaatgtactaaatgccactgacatgttcattttaaaatgaataatttaatgtaatataaattttacctcaataattttaaaaatgtgaaaataagaacatattgacctgaccttagggcaatgaagtaagcaataaaaaattcacattatatgcatttaaaaagtatctgagaacccttaactcagtcaaaattaatatttccttttatgtgctccaacagccctttattcattactccataaaaatattcataacattatagaatatggaaacattttgatgccttttacactgtccacccttactctcccaaatgcatctttcacttctacctttcttccttcttaaccttctctctcccatcccgcaattgtgattttacccagggcagtaaccttttacttttcatccttctatctttggtgcctagcacaatgtctatgctaaataaatgtgttaactgaatgaaagaaaaaacaaattaataaatgcaaggtggatcagcatgtaagcatcatagaggttgaagagcattatcaaattatctttcgcatcttgagttggaatttttacaccaataaattccaatcccaggtctttgattttttagcatgccaaccccactgcaatttttaaaggcttttgcaaaattcttttaaaaattctgaaattaaaattaatttcaatcatttaaatttttaaataaatgcatctcagcacttttttgaaagttagggattatatcaaaattaaataaaacaaaatgccagtgcaacaaaacagtcagagctcactctattcactggtgcccatttaaaaggcaaagaaattcaaatatcaaccacaaaattatcttgtttaatgtccatctaattatgtgttaacagaaattattttgggtgctccagtggtacaatcagttagcacacagtacgtatacagcagtatgtgtgtgagaaattattttaaatataagaattatcaaaaattataagaagaccatccctttaactgaatagtttcaccaaaaatcagaaaaatatgtaagtgatacattttgtttcttggatatagcaatgtaccaccttgcataaatgagactattaaaatgatcacctgaggtcagaagttcgagaccatcctggctaacatggtgaaaccccatctctactaaaaatacaaaaaaattagccgggcgtggtggcgggcacctgtagtcccagctactcgggaggctgaggcaagagaatggtgtgaacccgggaggtggggcttgcagtgagctgagatagcgccactgcactccagcctgggtgactgatcaagactccgtctcaaaaaaaaaaaaaaaaagatatactgtgcagaaaactaggcttttgtatttttagtggggaaaaattctaaatgcctttccttcataattataaccagttaatataagcccaaagaaaagtgcccagatgatataaatttgcaaacatagcaaagacaaaactcactcattttgagatgctcacccttcagcaatgcccatctaaatcccatagtgccttaagtgtcaatggaaaagtttacttactaaaacctactctgattcctatgactgaatttattctttctcatcttgaaggtacagtcttaccacatattctagcaattgatcgtatactctctggttttgtcctaacaactattaaattcattgagctcagagatgcatggtaattattttctatccccatgagacctgacatacagtcagcagctaataaatatttgttgactgggaaaagcattaacatatttaaacttaatacaggtaaatttggtagcaatgtctacttgcttaggtttttcaatgaaaaaaaaaacttgtatttaaaaagaaaactatgtattttaaatgtccaactaattctccttacattctctgggaacgtatttcccagaagccttttatttaaatgcacaaaattttcaaacataaataaacacacactttttctctaacattcatttaccagcttcttgtgaagggttgactgcatctataattagctctcttgggagcactattgatcaattgtttcatatacagtgtagctaactagactttaaatggttttcaaaactgttcaaattagttaaagtactgataccttccttcatcatatgaaaaagatcaacattctttagtctctcagtccttcagttaataaatacacatactagaaactttcaaatatacctgtgttgcttttagccagctaattactaaactatatgtaccctgtttgtagattgacaatttaaagcattttgaattaggatttctgtagctggcagaagtaaaaggattgaaacaatattggtaatataaatatttttacaggattattgcttttaaattttaaatgagtaaacatctatcctaatattctcccctttttcataccaaatactgtactttaaaattataacatttttaaaggaaaaatatttaatctacttgaacacttctagaatgtaagacttcagggtcctcagagaagatattagaatatttttcatacttgggctgttgcttctactgaattgttgccaatgtattttgtcatgccaaaaataaaaacaaaacaaaaattttcaaaggtgaaagcatttttatatatttgaatccacttcagaactacaagttgaaatatctcactttcaacaagtggcaagaggaatacagcagagctccgtaggcattttattttagagtaaccgttcttaatgatttaaaggatatagcaatattacccccctatgcaatttaatctgtatgaataactgtcagatacatgccacagcaaagacctttatgttcagttttttgtttgtttatttctgttttttagagacagcatctcactatgttgcccaggctagagtgcagtggctatttacatgtgcgatcacagcatactacgacctggaactcctgggctcaagcaatcttcccacctcagtctccttagcagttgaaactacaagcatgcaacactgtacccagcctctacattcagtttttgtttgtttgtttgtttgtttgtttggggggttttgttattgtggttgtttgtttttttgagacagagtcttgctctgtcacccaggctggagtgcagtagtgcgatctcgcctcactgcaatctctgcctcccgggttcaagcaattctcctgcctcagcctccctagtaactgggattacaggagcactctgccacgtctggctaattttttgtatttttactagagacagggtttcgccatgttggccaggctggtctcaaactcctgacctcaagtgacccacccactttggcctcccaaagtgctgggattacaggcgtgagccactgttcccagtccgacattcagtttttttaaacaactgttttcatgaatatattatggattactttgatctggatgaaaattattttgaaacataatcaaacgcacgaatacctataaatgtttcttctttgttccagttacttctgaacttacagtgtcagtattatattgtttaaaataaatgtgtcatggtatactttgcttataatcaaaaaaaaattgtatttactattactgtagcaaaaggaaaactaaaatactgagaagatatgcattttaacatattatttatttacttaatctcaaacaaaactattataattatattgtcttaaatgtccggacattgaattgtgcttctaaaattaactgacattttataatcccaagattttcatgaatatgtcatagtaatgttgtagttacagcaactgattgcacttcaaaaaaactttaagaaatactttaagccataatgcttaatttattttttaaacagaaaacctatacagacaaaaatgactaatatttcccaacacttaacaaaagttagtcttttcaaaagacaacactgtaatttgattaatgttaaagtcagctgtatttatactactacaatgtaaaattaagccttttcagttgcaagacttctcatctcttcacttgccatctaagttgtactcctgaaactttataatagagtatgtagtttgatccttttaactaattagtggatctgcaaacaggaagtcaggccattgcaattactgtccacatgttcatttatatcaaatactctacatgtcaacctaaccatttttatttcacaaaaggctattttttccttattcataatgtctttctggaaattatcaactaccctagcattaacataatggccatttgtacttgttgaagaaataaaaggtaatagaatttggcttaaacaagcagagataaagcagatagcccataaactaatgatttctgcaactttctttaaaccactcttattctgtctctaccttttatataaaagtctgatcatatatatatttaattccattctttaaaatttcagtagacaacttcagtgctaacctaccactgccctgtcaggaaatctttgatgtcacaatataatagctcctgaaagaacagcactaatacttaatgtaacatgaaaccagagctctgcaatggggctgtctgctgtcaggaacaaacaatttcaccactgttcctcagaagtgacaaggttgggacctatgtgtacagtatccctcactaccaacagagatttatttttgttaggaattaagaaggccagcttcatttaaatgtgccaatctctattttcacaatgataatgacagaataaattatattttaatgtaaaacaatgcacatgactcagttttcccctggagcccatatgttatgcacttaagaaggcctttgatgtttaaaaagaataggccaaatggaaatggctaaacttactactaagagccaattcatgcattatttcattatttcagaagtcacatcaaatatttatgtttcaaagacttttataacatatttgagttggaaattactatgcaggatatatatatatgtgttaccaaactatctgcttaaagctaaccatttcagggggaaaataatctatcaatagtggggaaaaaacgaaactaaaatagtggctgtgcagatagttaataaaacaaccaatacattaatttatttttaacctattaaccaattgaaaatatgacaatttccagacttgtgtaacactatgagggcacaaagatattactacttaattaatatttgaccaaatgtcttttagtgttacctgttatgaaacactaaagcatgtttgttcctcttctgaatccttaagctattgtttgtattgttcacttatcaaataactttttgacttctctgttactactgccttgaactgttaaatttgcttaatgttcatgttgtataagaaaaattataagctttagtgggagatgttaaagaagactaaaataactggagagagaaaatatgttaatatattgaaagattctatgttatcaaagtatcatttccataaaattttactaatagattaaatgcaaactaaattgaaaatcccaataggttttttcatgtgtgtggaactcaacaagttaattctaaatttatatggaaatgcaaagggccaagaagtatcaagacacttgaaaaataagaataaggtggcaggacctattctacaaaataacaaaacttattataaagtaaatataattaagtcagggttgtatgggtgcaaggattgacaaacacatcaaaagaacgtaataaagaacccccaaagaaacccatgtttatataggcatttgacataagacaaaggtaaccctgtagagcagtcaagaaaagagattttaataaattatctgggatagctggacatccataagaggaaaaaaagaaactacacctctactttagacagtataccaaaacatcttcaggtgtattcaaggtcaattgaaagtcactggagattatctttatgacctcagataggaaataatttcctaaacagcacaggaaaagcattaaccaaaaaagaaaagatcaataactatacaacaatattaaaaatgagaacatctgttcatcaaaagattccataaagtgaaaagacaagccaaaatggaagaagatatctgcaatacatgtaaacaacagttcatatacagaattgtatagaatttatatacagatttgtagaaaactacaaatcattttttttaaaaaaagatcctgtaatcccagcactttgggaggctaaggcaggtggatcacaaggtcaggagtttgagaccaacctagcaacatggtgaaacctcatctctactaaaaatacaaaaattagctgggcatggtggcacacgcctgtaatctcagccactcaggaggctgaggcaagagaatcgcttgaacccaggaggcagaggttgcagtgagctgagatcacaccactgcactccatcctgggtgacagagtgagactctgtctcaaaaaataaaaaaaaaaaaggcaatgacccaatagaaaaatgggcaaaagacttgaacaagcacattacaaaagaagaaatctacctaatcaatagcttatttaaaaagtgcttaatatcactagtaattaggaatgcaaatttaaaccatggtaagacaacatttaatactcagcagactggcagaaattaaaagtctgacaacatcaattgttagcaacaatgctgaataacaagaatgttaataggctgttggtaacactataaataaacactttttgaaaagagtttcacattatctagaaaagatgaagataggcatattgtctgactcaacaattccattcctgcatatatagcctacagaaacttgtacacatggccactaagaatgaatatatgcaaaaaaaggtttatagcagcattgttcataataaccagcaactggaaatagtccaaatgcccagtaaaaataaagaggataaacaattctgatattcacacaataaaaatcaaatcaatgaagtaggtcttcatgataatgatacagtttgacaaaaattggaacatacacaaaaaatagattctgcatgattccatttatataatgcataaaaacgggcaaaatcgaactatattgtttagagatgcattcataggcagtaaaactataaagtaaagaaagtgactaacattaaacacagaatggtgatggggtaacactaaataccaacagggagtatgggggtgtaattgggaaggaaaacaagtggcttctgggaaaataacagtgatttcattttttttacctcaatgttggttggttacataggattcacataactattagttacacatatatacatccatattttaaataccttatatgtttacatttcaatttcaaaaaataaaacacaaatctacctcagagttactgtgaatgtaagtgaaataatgtatatggaaaggtctttgaaaaccacaactacggccgggcgcggtggctcacgcctgtaatcccagcactttgggaggccgaggcgggcggatcacgaggtcaggagatcgagaccatcccggctaaaacggtgaaaccccgtctctactaaaaatacaaaaaattagccgggcgtagtggcgggcgcctgtagtcccagctacttgggaggctgaggcaggagaatggcgtgaacccgggaggcggagcttgcagtgagccgagatcccgccactgcactccagcctgggcgacagagcgagactccgtctcaaaaaaaaaaaaaaaaaaaaaaaaaaagaaaaccacaactacacacacactcagttttaaaagttaaagactggaaacacactcactcatagaccaaataagcaatagcccacatgatataaaatcccactacctcaaaaacacatgttgtcatagtaataagatatatcttctgtaatatcataaaataatgttgtcattgtaataagatatatcttctgtaatatcataaaatgatgtttaacattattcttttagagattcattcctttggattaaaacattatcctttttttaacatgccttctgagaaaatatactaagctgagaaataaagttataagggattttaaaggaactataatatgaagacttggagtttttcagatttagaataaatatagttcacgtctccttacaacactcctatgtgaaaggtctttatcctcatttaatagaccctatatgatattacagatattacagatcagatagctatgtttaaaaaccaaagagaaaagttttcaaaatataaataactgcgcatggtggcatgtgcgtgtagtcacagctattcaggaggctgacatgggaggatcacttgagcccagaagttctggactgtagtgtgatatgccaataggtttctgcattaagttcgacatcaatatggtgacctgctgggagcgggagaccaacaggtttcctaaggaacggtaaaccggcccaggttggaaatggagcaggtcagaactcccgtgctgatcaaaatataaataacgaatgaaaattaacttcagaaagttaaaggaagaaaggaattgaaggagtcggtaatttatttttactaattcatagttttaaaaatggaacctcacaacatgcaaattccatgttcaaatgtacacacacaaatgtacattatttcatttattaaattagttaagcaaaaagggcatggctagagaaatacttaacttcattatgctttataaaaataatttaagtatgtattgcttttcaccatattaaaatatatctttcttcattttccttctttctatcaaagccttctttgtcctatgtcctatttcagagagagtcgtatctcagctagtaggagtgaaattgttgtgctatacatatagtaacgctgtgttttactttttgagaaactgatactggtttctaaagtggctgcaccattttatattctcatgagcaatatatgagggttccaatttccaatgaatgttccacctttgccaacattttttagtttctgggtttgtttgcttactatagcctccctagtatgtgtgaagtagttactcattgtgattttgatttatatttccttaatgtctaatgatgtcatatattttttgtgcttattgtccatttgtaaatcgtatttggagaaatactgattcaaatcctttgcttttttaaaatttgggtatttgtcttttattgttgagttgtaatagttcttaatatattctgaattcaagtcttttattagaattatgacttgcaaatattttctcccactccatgggttgtcttttaactttcttgatggtttcctttgagacacaaagttttacattttgatgtccaattcatcttttctcttttcatttgtgcctttgatgtcatatctaagaaactattgcctatccaagatgatgaaaatgtattcctatgttttcttccataagttttatagttttatctctcatatgtaggtctttaattcatgttgggttaattttttatatggtgtgaggaagggtccaactttattcttttgcatggggatacctagttgtcttggcaccattttttgaaaagactattattttcccattgaattgtcttgcttggcacccttgtcgaaaatagcattactgtttttaagaagtgatttacttgtaactggaaattttgaattatggttacttgtctatgagcataatttgaaaagaagatttcagaatcactatattaatcattcaaattgcatgtagagtttttttaatcgtattttttccatctttgaactttactacttagcaattgaaactaattttatgatagcctgaagttgctgactattactggccatgaagccttctctacacttcagcttcctcctttataaagtgaaaagattgggctagattgtgttagattgtttttcccccaaagtttatcccactgtcaagttgctgtaaggcaaagaggaaggagtaagctgagagtgctgaaggaactgtcacagttccttcaaagtgtttaattttgttagatttcctttttcaaaatttgctttaaaaattagttcctctgcttaaaatacaaagtttgaaagctacagaattctatgactcctgaaaagaaagaggagtgcagagaaatattagagatatgaagataaagacaaataagattcaagattgtgtcctgaataaaacacaatgagagatcctaagcagtgaggaattacagcatgagtagcaaggcaccagaacagaggacaggaaactaccaattgaaagggaaagtttgaagactaagaagactttcatttaatgttttttgttttgatttccaaaatagctgaaaaaagcttgtttccttggaattttcagctctcctctgaaacaaaatatggaaatattctaatttaaccaaagtttgtctgagctgtgattctattatcccaaaatccaatgacaaccacactagttagtttcagaaatcagctagctacattaattcaccacatttacatatgctttttaatactttcactcagtaaatgcatatgaacatgaacacatagcaacactcttagaaatcaattccacaataaaaatgtatacatagcctttttagaattcaaaagatatttttctcttcttttaaatgctctacttattttattaattaaaattttattaatatatagaatataaaaacagtgaaatgcactaatcctaaattcagtccatcaaggtacttgatgagtttttatatacgtattctcccatataatcaccacccagaccaagctataaaacatccccagtaccccagaaggttctcacattcctcttcccaattaattacccaaccaaagataaccactattctgacttctatcattgtaaagtagttatgcctgaacttaataaatgaaatcacagtacatactctaccttctaccttcctctaatctttagctgtttctctctttacttctctatgctccatataatgtctgtgaaaatcatctacgttattacaaatatcaggtttttattgctgaatagtcttccaccgagtaagtataccacaattaatgtactctcctgttgtggacatatgggttgtttacagtttgtggctattacaaacaaaattgctacgaacaagcggtgtatgtcttttagtggacaaatacactcatttctcttgggtatatacctggaattataatttctggtcacagaacaggcacatgtttaactttagtaaatactgccagatagttttcaaaattagttataacaatttacactcccagtgtatgagagttccagttattatttaccctcaccaacacgcaaggcattgtcagtctttttaattttagcctaaatgctctatttgttaactttatagacctgtaactttactaattataaaacagaatatatattatccttctgtcctgtaactcttagctacttaaggtgtggttacagccagcagcactgatgaaaagcagtaaagacattacctgggtcattgattcctatgccctaccacaaacctatggaatctgaatccacattttaattaagatccccaggtgatttgcatccctactaaaatataagaagcacttctctggttgataaaatttataaatttctagaatggttaaaatgtcctttaaaaatctttccaaaagactctattaatgagcaagatatgttctagtaatatattctttatataaattcaattaccaggacaagatgctaaaatgcataactgagcatgtacaaggtaaataggtaatgtttaggcccaaatataggttcagaaaattaaaaaaaaacacagatcctgtgtattaaccccttttgcctctttctcggaaaatactttttggaaaataaattgttctaccaaaaagacacacccacttgtatgttcatcgcagcactattcacaatagcaaagacaaaatcaacctaggtgctcatcagtggtagattggataaagaaaatatgttgcatccacaaaagaaactatcatcagagtgaacaggcaacctacagaatgggagaaaattttttcaatctacccatctgacaaacatctaacatccagaatctacaaggaacttaaacaaatttacaagaataaaacaaccccatcaaaaagtgggcaaaggatatgaacagacacttctcaaaagaagacatttatgtggccaacaacatatgaaaaaaagctcaacgtcactgatcattagagaaatacaaatcaaaaccacaatgagataccatctcacgccagacagaatagcgattattaaaaagtcaagaaacaatagatgctggcaaggctgtggggaaataggaatgcttttacactcttggtgggaatgtaaattagttcaaccactgtggaagacagtgcggcgattcctcaagaatctagaaccagaaataccatttgacccaacaatcccattactgggtatataaccaaaggaatagaaatcattctattataaaaacgtatgcacacttacatttattacagcactatttataatagcaaggacatggagccaacccaaatgcccatcaatgataggctggataaagaaaatgtggtacacatacaccatggaatactatgcagccataaaaaggaatgagagatcatgtcctctgcagggacatggatgaagcaggaagccatcatcctcagcaaatgaacacaggaacagaaaaccaaacactacatgtcccctcactcataagtgggagttgaacaatgagaacacatggacacagggagaggaacaacacacaccagggcctgtggagggtggaaggggagggagagcttcaggacaaatagttaatgcatgaagggcttaaaacctagatgacaggttgagaggtgcagcaaactaccatggcatacgtatacctgtgtaacaaacctgaaggttctgcacatgtctcccatgacttagtgtaaaataaaattttaaaatgtggtacatataccccatgaaatgccataatactaggcagccataaaaatgaatgatggccgggtgtggtggctcatgcctgtaatcccagcactttgggagaccgaggtgggtggatcaagaggtcaggagttcaagaccaacctggccaagatgatgaaaccccatctctactaaaaatacaaaaattagccaggcgtggtggcacgtgtctgtaatcccaggtacttgggaggctgaggcagagaattgcttaaatccaggagacagaggttgcagtgagccaagatcatgccactgcactccaacctgggcgacagagtgagactccatctcaaaaaaaaaaaaaaaaagaagaagaagaatgaaatcatgtcctttgcaacaacatggatgcagctggaggtcattatcctaaccaaattaacgcaggaaaagaaaactaaataccacatgttctcatttataagtgggagccaaacattgggtaaacatggacataaagattgaaacaataaataccagcgactacctggggaggaagtaagggggcaaagactgaaaaactacctattagatactatgctcagcacctgggtgacaggattaatcataccccaaacctcagcatcacacaatctatcttcatgtgtatcccttgaatctaaaataaaagttgaatttatttttaaaaagtactttttttgttggatgagtgatacattagaaataacatatctggatttcagcaaaacacttgacaaatggtctcaaatatctttactgtactatatatttcttatagtagaccctgttttaatcaccctttgtatctttagcatctatctggcataaaaaataaacgtttgttgaatttaattaatcaagccttgtggatatatgaataaatgcaagctaaatgttagcatgctcaacaaagtttctaataatatgtaaaatgacagaattaggaccccaaaagatctcaaaaaaaaaccataaagagtaagaaagagcatataaccacagatacaaaaaagaagaaaagaaaacaatatgtcaactttgtgccaatatattttttaaatctagataaaatagtgggtttctcagtaaaatataattaccaactgtctcaagaaagaatagaaaatatgaatagaccaataaaatattgttaaatatctacctctttaaaaagtatgaagatcaaatggttttataggtaagattttttaacccttaagaactgacaattcctatgctctccaaattattccagagcatagacaaaaatgggagcttgctattcatttcacaaagatggcaagacgctactatcaaaacccttataaagatagcaccaaaataaatgaatcatagatacagattcatatatacacttaatgcctaagtgtcaatttactcatccataaattgggaataatatatacttcacaggggtaaggtatgccttagataatgcttggcacataatatattcaatatataaaataaagcttttgcattatttttcaactgacacataataattgtacatgtttgcaaggtacatagtgatattctgatacatgtgtacaatgtgtaatgatcaaaagcagggtaatatccatcacctcaaagatttaccatttgttttgggaacattcaatcctctcttctagctatttgaaaatatataataaattacttttagctatagtcaccatgcagtgctgtagaacactagaacttattccttctatctagctataattttatatttgttaaccaacctctcctatcccctctgctcctctatccttctcagcctctagtaaccactattctactgtctacttttatgagatcaactttttcagcttccatatatgagtgacaacatgtagaacaggatttcattcttttttatggatgaataatatttcattgtgtatatatatatatgtatatatgtgtatatatatacatatatatatatatatatatatacacatacacacaccacattttctttatctgttggtagacacttaggttgattccatgttattgtgaatagtgctgtaataaacataagagggcagatatctcttccatatactgattccctttcctttgactagataccaaacaatggaattgctggatcatatggtagttctatttttagttttttgagaatcctccacactgttttccataatggctgtactaatgtacattcctaccaatagtatataagagttccttttctctgcattctcatcagcatttttttgtctttttgattatagccatactaactggggcgagataatatcaccttgtggttttgatttgtatctccctgatgattagtaatgttgagcaatttataagacaaaactttagccaagttatccaagcattctttcattctaagtacctattaggtgccaggcactgctccagtcaccttttagtttaatttttattaaacaatgaacaaacagacaaaattcctgtctacatgaagcttacatcctggtggaaaggaggaagtaattccctattgttgatcccttagcatgcattggacgatcacttaaatggaatcacaccacaaaaaagggaactggaacaccctttcaattctaaagttccataatgcaaagactatgagtttatgatttgaggtaaaaatacccaaaatgcattcccaagctctaatagatccatgaaaggcttgtaacaactaccaaaccactaccatctcctccagtatcatcatcttgacattgttgcctgcagggagcccctttgactttacagctgcccactcaaatagcatatcatctatccgtttagatggtgaacacatagatgcccccactgctacagctactgtcctttttccactgctgccctcactaggaaaacagtatggaatgattagtaagagtttacctattgtcatgaggcaaacctgggttcaactcctacagtctactgccttcaaaaaggaaccttctgggacctagtggtcgagcctataattcctggccatgctgggctgaagctaagcacctcctgagacactggggtccacatcaaaaaagcttgacagaaacagagggtcaccaactcaacaccacagcggccttcacccacagccttctgtggcctagaaatctagtctgcaatcactggccaagccaggctgcacctaggcctgccctgggaaatgcctcctgggtcaagcatcctgtttgtttgctagctgctgcctctttaaactctgtcactgcatcttcagttactgctacatcacaaatctagccctgagaaaattcatatccaaattcactctgtgcccaaatcaactagtctccacaaattatgaaactcaaaaatgaagaggttataataaaggaattttagttccaatagatttgttgatttgcagttgaagtggttctcaaagtacctattactacagaacagctagaattatctcaaaggtactcaaacgtcactgtgttggggaaattgtaggattagttcacattacgtttcagtagtattcatttttaccccttaaataaagtattttgaataatgtactccttactttgggccaaattcttcttttaaagacatttgttttaataatagctaatgcttatatgacacctattcttatgtgtgccaagcactgttctaagcacttatatgtactcatttaacccttaaaacaaccctaagaagtaggtactgttttacaggtaaggaaactgaggcctgaagagattaaaacaacaggccaaagttcatactgttagaaagtggtggagtatgctttttaccacaagttcatttcatcccaagctaactctcgagcactgtacaggttagagaaataaaattagagtcagtataggatttctactcttcaagatgcttgacaaaaaatactaaaaacaggttttcaaacacagcattaatggggcgggggagtcaacaaagactcaacggagaatttttttttttttactttttttttttttttttttgagacagggtctcactttgtcacccaggctgtagtgcagtggcgtgatcacggtttgccacagccaggaccttccaggctcaagcagtcctcccacttcaacctccagaatagctggaactacaggcacatgccaccacacctggctaattttagtattttttgtacagacagggttttgccatgtttcccaggctggtcttgaactcctgggcttaagcaatccacctgcctcagcctcccaaagtgctgggattgcaggcatgagccactgtgcccagctgagaatattttaaactttggggacaaggaaaggttcaaagcttcagtcttttcaatagtacattgctctaaaattgaaatctaagcaataaccttcaggctgaaacgattactaagtgcttaaaaagaatttaagcatctatatctaaaaagaaattttaaaaggcccagttcttgcttaatggctgctcactgtctactgcaataaatcacttttcatataataaaataccaaatgagagataactggcctcagtggcctccctgtacattgctgaaacaggaaaaaaaaataacataaattcagaaagaagtttagaggtaataagaggtggggagaaattaaagaaaaaaaggaaagaaaacaagtgtttctgtctaaatacagagagagacctactactggatgcaataaatatcagagatggcttgcctaaaagccaagagccaaccatcagtgaccttcaaggacttacttaggcaacacagtactctcccttagcaggagaagagccttagaagaaaaaagatagcctgggcaagacagtgagatcccctgtctctaaaaataaaaataaaaattttttgattagctggacatggtggtgttcacctacagtcccagccactccagaggacaaggtgagagaatcctttgagcccaagagttcaagaatgcagtgagctgtaatcacaccactgcactccagcctgggtgagagagtgagagactgtctgtaaaaaaaaagaaaaggaaaaaagataatgggttatcaaatagaaatgaattacctaactggtccaaaggaaagataatttgagaatttctttatatgaatgtgaagctcatagaagtacagacagtccttgttttgcattataccataactgaaactagtgcatagtgcagccatgtccccactttgcatgattctgtaataactgagatcaaactatgacatgagaattgtgtaaagttgggatcagagctatacaaagtgaagacagggttatgatgtacaagactttcagttaacaccatgccatgcaaagcaaggactgccttaataaacacacctgctgaaattcaacaccacataataatatgttcagttccttattatccctattatccaagctccttattatctggtctgtagattacctggggaaaatctcttagcttaacttgcatgttacagagagctgcatttatatggcagaaataccatagaacttcaaggcaggatatctaggtttagatttggttctgccatttaatggctatgtaaacctgggcatgtcatttttcctttctaaaccttaagttcctttcctataaaactaaaataatgacatctacctcccagggctgttgtgtagattaaataataaaataataatcactaatgtttaatgagagcttacaacatatcaagtactgttccaagtgtattagcttaataaaacctctcaaaaaatagtatataggtactattattatcaccatcttatgaaagcatccagaaatatgtctatgtgtggtaacggctcaatatatgtttggtgatatgcatccagttcattaaccaatattatctccatccatggaaataaatagatactgaaaagaaagtgagaaaatcagaaatctgttcatttattaaatgcttcaaaaaactggtgtaagaagagaactaagttgttaatgaaaataggggtgttatttattcctagagattcctttattctccttctcttgagtgctagttgcactccaagattctggaagaggttaactaacagacttcaaagacagccaactctgctggtgacagaaaccatactcaaaaaacctggcactggccactgctgccagtccagccaaacacacgcaatgaattgatggctgtgtcccaatgccctgcctatttcatccagcccaacctccttcacaggcacaaccctccagatgctaacacttccttcctttctaaagttctcattagacactttaggttagaaagcaagagcactctccaggagcacactatggaaatatactctatgaaaagctgtatggaaaagtgaagggaagcagctagaaatagtgttatcgtttttgctcatgagtctactagcatgaattcatatattaaattaaattcctagcatttgtcactttagaaggcacagtggacatggtgcttgaaagttctatataaaggggaagcacagaacactatcccagatggatatcagcagagtgtcagagctcaaacctctttggagatcatcaaacttcccaatcaccaacgaaagaactaattcctagagagaagtgacttagccaaagtcacccaaagtttattggtagagctgaaactcccaaactggatttttgctactatagcaaattgcccaggaaatataccaacgagttagagaaaagaagaaaagagagtactgataataatgtttgcctacagccatccctaagtgctgccttactgtcctttcccagcttctgctctgattttatctaaatccaaggaaggctgggtgcagaaacaacaaagagccccagacactcaggagagtagtaattctccacttgacccccctctcctgaacatgataaatacacttaactatggaactttgctgaccccctcacaccaacaaaatgactcaaactgctttgccttaaagaataaaagatgggttaaatctgcttcctttctcatattaaaaatgtcacactaggccaggcaccatggcttaagcctataatcccagcattttgggaggctgaagcaggaggattatttgaggtcaggagttcaagaccagcctgggcgttgtagcaagacactgtctcttttttaaaaattaaaaaatcagcacagcatggtggcctatcatcccagcactttgggaggctgaggcaggaggatcacttgagcccaggagtttgaggctgagtgagctatgatcgtgccactgcactccagcctctgtgacagagtgagaccaatcccctcccaaaaaaataaaaacaaaaataccatactactgcttcctgaacctcaacactgatcaatctgtagtcctacttcctgtcccaggtttccagttatggctacattcttcagagggactatgtcccagaagagtgtcatctggagaccatgcatttcctccttgactcatcatgccctcacctctctttccactcttttctatttcagtagtctccaaagtgcgtacatacatcctaggagtatactacataaatatgctgcagtatatttatttattttaaatgtaagaaaaattaatccttacctagatttaaatacagattgacagattgagtctatatgtcttaatgtgcaacatccaatatcagaagtatcctgggtaaagaaaagagaatgattgtagataatataatctagttttttactaaattaaccctgaacaaatgcccaagtggtttaaaatgattcttccaaaaaaactatagcttaaggataatattaataatgtaggccttaatgataacaagaccatgacaaagctgacatttctacaactagtagtagctcaatagcaggcatattacaggatagaaacaatgatgatccatgcatatctgacaaaaaataagccaaaatttatttaatcatcaagaatacaatttgagatagagatttatatctagtatcattaacaatatactttgccctattgtactttcagatgttaagcaatatgaaccctttacaatcagcaagatatttaaatactaagcacatcaatataaatctatattgctgcaatttttccaacaatgtttaaaatcatacaatgctcaatcagtactttacaaaatttcaccaaacataaagttaaatgttgtgaaacctctttgaaattcttttataaaagataaaaaagctacatgctatcagaataacacttgttcttcctgctgctataaaaaaggttaaaataatatacaaaaaaataatatgacaacaaacgtaaatacattcccttaactaaaaatcagcactgcgtaatgcaaaactctggagtcaccatttacctagaatgcagtgtgaatgatgtcttctggcattgtataggtggtactgccaaaatgttgaaagacacatagaaaacttggctgaagatttgcaaaaagaaatgtcaggtaggacgcttgcttttcagatgaatgaatgtacatatttctcaacatgcctcagtttatatttaataggcaaagtgctaatttttagtgagccatttaaatatgtaccaggaaagataccatctcaacaacaagttccttttttaagaaagaaaaatttttaaggaaaactaaggaagtgaacccactggtgaagtggttgtcctagctgaactaaaggaacaaagggataagattacagagatagtaccatggacttcactaactacatcattcacaatcaagcaattgtagcaaaatgttgaagcccagtgctacatgataatgaaattactttaaaaaataggcttagagtaagataaatggataaagaaaatgtggtacatattcacaatggagtactatttagccacaaaaagaatgagatcctgtcatttgcaacaacatgaatggaactggaggtcataatgttcagtgaaataagccagtcacagaaagacaaacttcatatgttatcacttacatgtgagagcttaaaaaaaaaattaaaacaattgaactcatggagacagagagtagaatgatggttaccagaggctgggaagggtagtcagggaggtgggcaagtggatatgcttaatggtacaaaaatatagatagatctagtatttgatagcacaacacagtgactacagtcaacaataatttattgtacattttaaaataactaaagtataattggactgtttgtaatacaaagaaagaaaaaatgcttgaggtgatagatacctcatttatactgatgtgattattatgcaatgtatgcctgtatcaaaatatctcatgtaccatataaatatatacacctatgtaaccacaaaaattaattttaaaaaggtctgtataccatggtaaaatctttacaatgctttgaaatgagaaggggcataaacatgagaattgtttgcagcatccagcagttcactgcttatattatggtagtttccaaacctgagaataaaactaatgtaccaaatgtgctgaactttcatgtgatgacaagaagctgtgagtgtgtgttaccaaacacatagattagataaatggttagatacatagatagatagatagatagatagatagatagacagatagatagatagatagatagatttcagaaagataattaggtatatacatacaaacatagaagcaatcaaactaacttaatctggtcttcaaggcaaaggtgatattttatcaaatgagaaggtgaatgcttttcaaaacagatttatgttatgaaagaatattttgaaaacatgtttgaaaatgattccatcatggtgtgaattttgttaccaaaaattctatgctatcacttacaaaaattttcatctattttcaatttaaaaattggtatcagaatattctaacctgtttagtgatgttccaaaaagtttcaacaggttttgagtccatttattaaaaaatattaaaatgctatacctttgacctcattggcaaaaacaactaattgtcatcagggaagacagaggctacaagccaaattttaacaaaattatttgcatacatttgtatgtaatcaatttgtgcaatcaatgatgttcttctcccatttggatctatttttctttctgagatatcattttcagctgtggcagcattaaagccatgtagcaaagtaaaataaacttagaatcagatctttaaattgcttcatcacactgtgttaaactgagactgttaaaaataacaaagcatattcgattataggatttgggagaccacaattcattttaaaatattatttcatctatatctctttcttttctatatctacaatatgtacaagtttataacatatattagcaaaatagtacatgtctaaaatttgaaatacatatgtacatgtattagggttcatgagcgttttgctaagggcgtgctctatccaaaatgtggcaaccactattctgtcagaagttctcccgaacaaaccttaaaattgtcttgccagaggaattcttccagactcaaccttaccagcaatattctccagctgcatttaggctatctagaatgcctaagatctctatttcctctccatgaatatcccaagttatgcccctttgacctcaggtactgaaaatgtttcctaccttcactccaatcaatcaaggaagataccagctataggttactatgtgataacactgaaacaagcattttattaattatcaaacatatttacttttaagatgcactagtaatatacatattacttaaatacatatattaaatagacagctcatttgggacaagttagaatgaccatataatttaacacctcccttactaaatttaataaaatcatatttgtcttttaaattatctcagatataaacttgttaaatgagcaaaattaataactatataagcatagcctcataaaatgtaaagaacattaatacaaatgtcctattttattggcatttaaattgcagaaactagcacatatacaaatcaaaaaagaagaataacagcccaaagatgtgaaagtagtactaagaaaatgcaaaagaacgtggcaaggctaatggaaatcctctccacaagagttcccctttattctaggcctcagagaatccctgcaaataatataccaaggaacatgatcagctcattgaaataaaaacaaaacaaaacagctaagcataagagaaaataaggtgccttgagcaagaatcttaagaaaaagcagagaccagctatggctctcggtagtgaaattatagatactggagttatcagcaagctattttaaaataaataggttaaagaaataaaagataagcataaagcacatatagatatttctatatctgcctataaagattacctcaccaatttgaaaaaaaatcatttgaacacacagaaatgaaaaatataataaaattaaaacttcaagggataggtttaaagcacattaaatagagctgataagaacaagtggcaaggagtcatggaaataggggagtgcccaccatcttcccaacatccttctttactcagggtgagccatgacaaatgaataatggaatactctttataaacagggatggattttgagggtcacagatgatgatggtcagctttgaacacagcgtaaaagtaaagacaccaaggccatggatttctagactatgtctttggccttcatcacctttaaaatgagttattcctgcttatataaacgatgggaagaacgttgaacaaatcaaaatccacctttagaaaaaaaaaaatcagaatgctcaccatatatgttagaagtttcttcccaagtatttaattataccattttctttcaatatgaaaatgaatgcaaagggcataaagtgatatttttgtactgtaatcagactttcatagaaaaatgacaaccaagcacttattatgaaccaaacaaggtactaagtgtgttatgcacatcatctcctcaaccttcacaatatcctaggaagaaggcattaatattctcatttaacacttaaggaaatagattcagagaggataaataaattgtaaatggtagaacaaaatttgatcccgggtgtgctgattcaaaagcccaagctcttaacacctaaaacagtattgttttatacaaataaattcagaattaaaaaagaaaaaattcatgtacaatataaaggggtatactttttatatgctctatttacacagctcctgataacattgatgagctttccatgtggacataacaaagaaatcaaacacaaaacttcacaactaagacacagctaattatgaatgctttggaaaacggcccaaggtgttttccaaacctgttaattaaaagtcaagctgtttctcattctttccctgtcatgccctacataagaatatgagtctctaagttcactagtcctacccaacacaggttgtatatatatgaatatatatacctcagagaaaataagcctgttacaaaatgccatacaatttaaaacacaaaagtcaaaagtattcagtgtacatgagcccacattagcatagctgtaaaattacacaaacctatacaaaaactacaaatggacgcattctctggatttactgttatctgtaaacatttaaagaatctgatatcaaaaagctaacaatttctttaaaaatgcctttaagggttgcaaggttacaatccttttttaaacctcaatatatctactttcattgtgcattgttatagtgggaaaggactacagctaagaaattttaaaacaataaaattttccttccatatgtatttaagtctccagagtcaagggtaaaaaatgttcctgagactcaattgattaatatgctgttttccaagttatttaaactttgttcagctgctatattctttcaatttttattttcttttcggtttttgctttttttttttttttttttttttttagacagggtctcactctgtcacccaggctgtagtgcagtggcgtgatctcggctcactgcaagctccgcctgccgggttcacgccattctcctgcctcagcctcccaagtagctgggactacaggcccccgccaccatgcctggataattttttgtagtttttagtagagacggggtttcaccgtgttagccaggatggtctcaatctcatgaccttgtgatccgcccccctcggcctccccgaagtgctgggattacaggcgtgagccaccgcgcccggcctggttttggcttcttattaaggaacttaattgaaaatcttaaaggaagatgttctttaaatatgatgcttttagcatcataactaatttaatatgactaagaggatgtttttaaactgttttctataaatttcacgtctttttccccctcctttactaaatttcagaacctttctttttaatgtagagatttcatcatttttttttcatgccattaccaacaatgcaagtctccaggatgccaaagcggtggtgaggaaaataggttaaagccattgtagaccacggccatagcttctctagcctatgtgaccaccaatctcttttcagaaagtgattatgtcgcagtcatataagctgcaaaactcagtaagtgtgtttaacttggagaaacaagttattaaacaccagagagcttccaaactaaaaatatgaaagaaggcctgctggctcagagaaaaggcattcaaaagttattagaaaacatgagtttccagattatgaaattaggtgggcatgatggctccacctataatctttggaaggccaagtcaggccttctttgaggccagaagttcaagacccccctgggcaacaagataccacctctaccaaaaaaaaaaaaaaaaaaaaaattagccaggcatggtgatgggcttctgtagtcgcagctactcaggaggctgaggcaggagaattgcttaaggccaggaatggctgcaatgagccatgattgtaccaccgttctccagcatggacaacagagcaagaccccgtctcttaaaaacacaaacaaacaaaaagattaaaaaaacaaaaacctaataaatggatttatcatccccattggaaagttatcagtagagagggtttactgctgctactgctgcttctgccactactactgtccatcactatcattgtataattataatttgtatttcttccaaaaaccttaaataaccactctgaggattaatttattttcatattatccctcaataaaaaagaagttatgatatacaccaactttgccattggaaaaacttaattataaatatgaggcacctaaagagctgcaacacataagggaaacagaaataacacctagatctaaaagctttcagacacagctttttctctaagatcatgcttgtccattttctaaaagtgtattacagtgtaagatacaagattttattaactcacagccctgatcatcagttcatatattaataagccacttactgtaattttcatacctagttgacatatttgaaggaaagtaataatttgaaagattcctctgtaccttaaaatgcactcacaatgttcctgaccacaaaactgagctaagaaagagaagtgcagtggctaagctgctggcttatgtccatatcacattcatgacagacacagcctttctaggaatcacaaagaaacatgtacgagacatttcagtgtcagatctacagaaaagctagttatactgtcaaatgttcccccatgttcagtgctctttaggatgttacctaaagccagttcctcatcatcctttaaatcacagatcaaaggccatctcctactagaagctttccctgacataggtacttctgctgttatacataacgccatgacagtaattagcacactgtacagaatcacctatatccatacctcttcactagtacaatgcattttcatctttgaaattatgtaatcaagttcttctcagccttttcaccatcaaggattcttttattaatgaacctcatgttttgaaagattgttttctatcaaacttgccacacttattattacataattttctaatttgtattaatcaaagacatatagaactgatgtttaatgcttctgatcagcatggtattattcttttacattggtgtacgggaaatgcagcaataatttggctctggaagtaagtatgaaaatacaataaatgagcactgacattatatcaaagagatggggaaacaagagggccaaaaaagccagttctaacttatgacatacaagctttgtttgaagtaaataatatcctgaagcaaaacccaattgaaacattgattcacatcaagtagaaagttagtatggctggtaagtttatctactccacataccttttattgaatgaggcaatgaatatgaaggcactttaaaggctgacgagtactataaatataagagaattaagagactttctcatgccatggttcttgtactgatcatataactattgtcaatttatcctaacaccgttatccagaactgttctacccacttatatgtatatatatatgtatgtatgtatgtatatgtgtgtgtgtatatatatatattaaatatatatacagtagcttcaaacttaacctttctaacaacccatggaataaattatatcaccatccccatttttaaaattagaaaattgagatttggggaggttgcattacttttccaaggtcacacaactagtttagcaaataaaacaaaagaaaatcttcaaaaaatcaaaattgaaagtttaattttggtcttcacacatataggtctgtcattcaaatgaagaagaatgtttgctttcattttttcttaaaatgaaagcaaaacaaaacagattgagatgggtatatttgacaaaaagaaatcctggtgttaatcattgatatatataaccaaagattataaaatctccttttggcaggctttcaaaataaagagaacttcttaactgattagaatgaagaaaggatgatcaatactatatagcaatgacaaatgaaatgacctttcaaactcttttctaggccttagaattgtagttttatcaaatttgagaagttgaacatgtaaactctacatttagtcattactctatcccaagtcttccagaccatagattaattctcctttcaaggaaagaaagttaagaacctatattgctatttctattttacataagagggaaagaagcaagttatgtaacttcccaaagattacatagcaattatgtagtaaagctggaatgggaagccagatccagataactgtaagtatagaaccacttcaactataacagataacatgtattaaatgtttattttataccaatccctcagcttagtgctttacattcgtttatctcatttaatcctcaaaacaaccctatgatataggtattattattattattcccattttatagataaggaaactgaggcttagggattataccatggatatattgggaggagaggagctgacttctcatacacagaaggttcaatgcccatggacctagttggaaattattttgagaaaataaaaatattcctgaccttcaatattctttcccaagaaaatgcaatgaactactctctcttagctgagggcattcttactcagttttatcaacaacctgcttagcatcaagacaaccacacctaagtttctccacctaccaactatgaaaatcttcagaagaagagaaaatcctttaaaagtaaagactcgtggcttcaaaaatgctcttcagggtgtctagaacttagtaagtctttatgttattcaatgacctatttgtaaagtataaaatgtagcatttgcaaccatgcctgggaatgagtatgctctttaaaaaaaaaaaaatctgttgcattttcttttttctacatatggggcttgtgtggccttggaaagtgaagcatctttaattttctttgtctaattttaaagaaccacttttcaaagaagcaaagaaattgtgctcggtgaagtcaaaatcacaaacagcataaagtccctttttacatgtgaatggatatatcaaagatagacaattcgtctctttaagatgactggaaacaacaaattattgaaggtagcaagggtgacagatcatttcaagggttatcgtgggagatttttctgagaagaaagagatcaagagagaaccgagagaacatagaatgtttgtatacactgtaatatgcacatcacatagtgcactttgaatttatcttatatttattatgcctatttatacgtatcatcattgaagagcatcaaatcaatatacttaagtaatttgattaaaaatagttaaaacacgcaaaactcttaaaggatttaataatatcacgttaggcttcttcaatacatggtgcttcaatccagagaaatctttagaaggctttatagaccatgggagcttagtaaataaaatacatcaatgaattcctcgccacacacaccacaataaaatgttcgtagaaagagagcaaatacagaaatagaagagccagtagattacagagcagcaaattgaagttggtcaccaaagatgcaaaaatttctaaaatatatacagcacaggactaccaattgttagattttgtatttcactatttatccccaaatagttacagtctaaaatattaactcagttattgacaaataaaatcaaacgtccctctataaatggaaagagataactctttagataaatataaagatttccatagtttcaattgattgttgttcacttgaagtatcatgaaagagaatgccactacacattttcatgccatttaaatgaaaagaaacatatcagaatttttctttaagtatttaaaaaaggatttttttccaatatatgtattgtgcaagtttgtgaggattactaaatatattagcattataaagtagaaataagtaggcagttgatttttaatgtggtttattagtttataatagattacaacatctacaattaacctcagaaaataactcacatctttcctaaaaatgaaagtttttttgagtgaataataaaatatgagtgatatattaggggtcttagaggagcaagaagagattctgaatataaacaagccatcattctggtaaaaagaaatacaaacaagaagaataaaaatagttgatgcacaaaagccataatgagggggtagctcaaaaaataacttctactttgaatggtttggatgaaatacaaattatccacagaaaagtgtggactggcataaatgtttgtacaaaattataagtgtatttcaagaagtatgcaagaggcaaccgcctgcatgatgcacaaggtcccagcaatgctctgcttaagtgctagtgcacagagtccaaaccactgcattttaattaccatgcagcttcagatatattgcctttgatatggaaatgttcttcttctctcatcttcacatatggtctcatgcacagaaatctttatctgattcataaaaaataaactagaatccaatctcaacacctgacctcagtgcttagaagttttttactaagcatggtatcactataaaaagaatggctaatattggtgtaaagttggatattttgagcaaagatatgaaggatttgcagttaggaactgaatcgatactgcttctctgaggttttagggtttcatgttcccttttttaagactaccacagatttgaggaaaaacagaccagcactcttttttggagctgagagagtctgcagtagatttaaatgatattccattttacaccctccacccactttcttcaactgatatttctatccaaactattacaatgaatacttaaaaattgaaaagctctatcaaaacccataatgcaaattttgaactatttccagtttgtttaaatgtctaaacaaaataattaactgaaaagcttttacccttttccacagaacaaggaaaataaaaacactttcctgtgaataaataatgaatatataatgaaaggatgggagagtttctgacacaacgctcaccaaaacaatgagttttcggatcacatttgaaaaacctcaggccaaaaggatatgctacacatttaaactgggcttacattaatataaattgcttttcctacactatataggagcactaggtttttttacttgaatattgagattcagggcataatcagtagaaaatatacagtcaggatgaatacataaactgttctaataccttattttccttattaggaaaaaaaacagaggagagacatatttcttaagaagaaatccaaacccaaagatagtccatttcttcctctaaacagcagtgaatgttcatttttagcaggtttctataataaaatctgttatcattaaatctcatatacctacataacttgataattgtgaaataacttgattaattttttaatggtaatatggcctatctaacctcatgagagcagataatacatcccatctgcaaaacatcttgctgtaagttatctgtgttttatcatttctagtacctgtctgtgcctgatatggtattctcagacacattagcttgatggaatgtttcacttgacttgaaaaacatcaattgatatatatgcatccctaaactatattaaaacaaatagctcttagataaaccaaaatttttgttgtactattctatactttcatagaaagttgttcgtaaatagtgaaaaatatatgtatgtatgaattctctcactaacaagagaatgctttcaaacatggaaagagatacataaccgaacaaaacagaaaagcatagaaaatattaaaagtaggtgttaaagccaatgtatattatctttttcaaaagaaattcatttattccagtacctactatactaattgaaagaaaattatttaaaagtcactaatatcttcaatataagatagacatgtgtagcaatttcatcagtgaccaataactaaataattcctaaaaaaggtcaaatagaaacagacataaaatctcaataatgccatcaaattttatcattttttacagtaatattgtttagagcattgtaaaagaaagatttgccagttaggttaacatattgtacatatatgtttttcccttaaaatgaaaaatatctgttgttttctgctactactgaaaaaatgcccaacagacaatataattttcctacttaatctcatttcttctaggcattcagttaccaaatccattatagaatcagcttaaggtataggtacttgatactattatatcatttatatcatgctccataataaagaactcaattttttgtgcattttaaaaaatacatattcaccaagagaatgttccttctcatgacttccaaaacatcaaataaaagcaacaataaacagaataaacaataaacaaaaagctatctagttttgccactataactgaaggaatatggtggacaagagaagagaaacgaggtgttggtgatacatgagaaaagcaacagaggatgtcactatgcctatggaattaatgccctggtacttgatatcgggatcctgcttacttactatctttggtcttaaactagacctaataattgtgatgcacacttgctttcaaagtttgaaacatttgttttttggttgtttgctttttttttaagagggacaatttctcttgatttatgaggttttcaaaactgtagaaggaaaaaaactacatgtcatttggcctactgcccatgtgctcacatatgtgtattcaagaagatacttccaaaactgcacggaagatacctaaatcagtcataacttttctcctgttacaagaaagtgaaatatttcatcggttcaatgaaaagcaaatgcaacttaataaaccgtgtcctcatttcccaccaagaaaggtgcactcttgctgccatagaaaagctaaccctgggccgggcgcggctgttcacgcctgtaatcccagcactttgggaggccgaggcaggcagatcacctgaggtcaggagttcaacaccagcctggccaacatggtgaaacctcatctccacaaaaatacaaaaattagctgggcgtggtggcgtgtgcctgtaatcccagttactcgggagactgaggcggaagaatcgcttgaacccaggaggcggaggttacagtgagccgagatcacgccattgcactccagccggggcaacagagccagattccgtctcaaataaaaaaagaaaaaaaaaagaaaagctaaccctgtcccactaaacttgtgaaagatttaggatgtttgcttgtttgtttgttttgaaataaaaaagagtcttctagtaggtatcagacatatctgagtggcctagaaacaaggggggaggaggaagactgatgcaagtgcctaatgttgagtgttgaattccagagtaactgcacagggtaacagagggaaagtcatgttcatggctgcagaaatctggtctctgccagaaagtgcaggctaaagcagacctgacactgggatctgggaagccaggtaggaagctcaagaaacaacaaggtacttactgctcctaagaaccccaggctgaaccagagtaagatagggaaagacagtagatctgcccaggctttcccacagtgatcactagcagccccaagcggctaggcctggagggggaaaccagaagctgcaatcagagcacggatattaacttctgagagacctttgggagtgggggtgggagggagcacagagacaggtaaacaatccaacctagaagcatgaagtccctacccaagccaggacatacaatgccaagcctggaatggtcttactgggttggtgcagagggccactagcagccctcccccacgagtaggatgtgaagaataggtatgttgccagattttctctgcatctcctttccccattcagtctgcactctgcgctggtgtccagtacccctcttaccaatagttgaacagccgaaaaataagaagataaaataggaagagaagaaaagaaaagattaaaaaaaaatccaagacaaggctacactgtcacattcttctctgccacggcctcccgaggctgccctggcaggttcggccctccctcgggaatcctggaacccagaacagagctgagcggaccaggtcggccaagcccgtgcctgcgggcctcggggacgaggtgctgagtgcgcaggctaattatacatgtggcatttgggcagccgactgtccagtgacaccttaccttatgaggaaacgtcaaccccagcaactgttcaaaacaaaatgccattgcgggatcagcttcgccggcccttggccggttcagggttgcttttcccacagcctctcgaactttgtgcaagaatgtggcctagggaggccagccgtgcgcgggcgggccgaccaaggttgggggacaggcagggcaggacttgccaggtgtccgtcctgtccctcctcgccatggaccagctcgccgacctgaccacttgaccttttttattcaccaaacccacctcctagaaataaactgggcggggctgtgtctgttctcctcgggacccggggaaaaacctggacatgtgaccagaaagggcaggagagagaagaccctagtgggcgggagtagaggggccctctctcatctctactcccccgggttgctggctgggccgtgcagccagggccaaagcccggccgcaggagtacgcggctagcaccggcgcccgggacgcggacgtcatccgagcgcccattgacagtacagcgggaggtccggagcccagcccagtttgccgcaaggacggcttcgggccacctctagccctaaacttcaagcgcggccctcacagggtctcacacacaaaagcagcccaggacagcccatctcgctaacagcccagccccgccagttcagtcgaagacttatttttagtccccaaataggggctgcattcaatatctgacaattcacacaaaacaacattttcaaacttggtccgcctaagagaccgtaaataaaactcaaaacaagctggcgactgccaccttttatctgctccgaacacaccaattctttttatcttaaagctctgcggagcgccggggaagcagcccggcaccgagctaatctgccctcagcagccccgggccgctcctcccggcatcggagcacaaccccagcagcctttgcacaagccctttcccttctctgcccggccctttaagggagaaggaagaaagcagctcccgcgggagcggccgggctcgggctgggtcccggggcgggtggcagcaccgccccctgccctgggccgagcccgggagcagcggaccgcggccccggctgcagaggaacggcgggtggcggggccccggcagggcgccgagaaggacggagggcgccggctgggctcagggacgcggggcggggaagaaacgtgccggcgaccgtgcgctcggccgggtgactccctggcgaagtccgcgcccggcggggctgaactacccctcgcccccgctcccgccaggtcaggcaccactgccctcgcggccagggtaaagaggaccacagatcagtcagccttggatttcggatgggcttggaattcggtttgtttattcctgaaaagatcattaaaaagtactgtccaaaaacggggggagggggaaggaagggcgacaagcggagggagctggaggcaactcgagcggtgtcccgaaaaagttgcggcggagcggcggtggggtgagggtgggaggagggagcgcaagcgttttctagcgacccgggttttcttcatgaactcctccgagtaaactttatcccggcgagagagcggcggagatcctcgactcccgcccgccctcaaccagtgtcaaccccacaaacagcctaagtttccaaaccgaaatgggggtggggtgggggtagcattaagaagcccagaagctcagcgggtcctcccgacctcccgcacccagagcctgggtgacactgaagcgctccgaacactgtggcgtctcagtcacacagcgaatcaacccaacacttttcaagaaaacaaaatatttgctaggaaacttactttgcatttagtctctattctttgggggatgcggtttaggtcggctcgcaagggaagcccgttttgtccaggttggatattgtctacgtatggatcagcccttggatgagggtttattttaatttatggcttatgcattcttttaaggtcgatttacatgacctccggctacaactaagacagccgaggagggcactccagtcgtcagtcggccaaacccacaattaaaacagccctccccctagtctcggtgtgactagggctctcccggggtaggctagctgcctgcctttctctttctctcttctctctttacttccctcttttttcttttttttttttcctttatatctttctttttttagtatcgcgaaataagaggtggtatcagttttttaaaagtttcagtgtaactttctctaaacccaagcctgcggcggtaacaagagatacagcgctcacaaagccctcgggatgttgccctcttgtgggcacggagggcattaccgcctagcggtcccatctgaaccttcaaagccgacacgcatttgctttcacagaacgaggagggatgactacacacgcagccacaaaagcttcctctatcacacacttgagcgaacttcaatgaaatacctacctcgaacttcacggagacttacaaattcattctctaagccacctgacttctttttcacatcattcccaattatatagattagaataccaatgcggggaggcggaggtggaggagtgaggtgggccgagagggcagacagatttccggacgaatacttaggatggcgataacagctttctgttgtcaaaggttgcgttgtgtccctgtccctgcccttttgccttaatgtcctacgcacagttatctacggctacaacatgtgttttctcagggtggattttttggaggggaggtgaaggggagaaaaacagacccccgccacgcagatctgtcactccggaacaaggcgcaactctccaagagggggacgcatcctcgggatcagcgcgtccaccagcgagcggcgggcgcccgggcccctttctctccctccactccccctccgcgtcggcccctcggagcgccctcctcccgctcctcctcctcctttcccctccccagccaagtacgcaaacccgccccggcccggcagccgcggctcccggccacccgcgccctctcggggctccgctcgctcggctctcgtccctctgcctgtcctgccccagcccctcggtcccagctcacagaaactaaccctggagtgcccggaagggcaggagcggaagacgccgggggacggcggcccggccctgggctcctgccccctgccccctccggcgccccaacaggtagctcacagcgggccgcgcgccctggctctgcctccctcgctctcgagatcgctcgctccgtcccggttacctgggcgggctccaggatggtaccgcgcgggagggctccttgtgcgctgcgccgcaggagtaaatggcattaaagaaaaagggaaagatacaaataaaaaaaattaaaaggaaggggagtcggtgctaggtcaattgtcacagtccggggagcaagggaacagaaccccccagcgccgcggccggcgtagcccgttaactcaagtctgcgggggtgtcccgccccgggtgggggcagcgcagagcggcagaagtttgccgccggggttccaggaggtgcgcgcggagcggggtgactaggggcttcaccctggaacaagtgaaggcgatggttagtgctgtcaatcttggcaatcagtgtgagcggccatgtcgtaagtattcaaagcatttcccgtcgtgcaacatcagaaagtgagtggccagggcattgatctgagcgagggagaggaggctgggctcccctcccagacaacacaggcaagatgagacaagaggcgagggaggcagcgagccaggcagagaagctgggagggaggagggcgggccgggggaagaaggaggggagagcgggaggcaaaggcaagagagagccgcaaagagagaggagggcagagacatcggcgagaccagaggttggaactggggaaagcgcctggaaagagacggtgaagcaactactaggggagaactggaaggagacaaagaagagagaaagtcggggtcagaggagaatggggacaagtactaggtgggggagaggcaggctgaggggaaaacgaccaaaagagctctattggggctagggctgctgggaggaggagtcaggagaaaggcaaactgtagcgtggaaaaggtaggcaactcggggagaaaaaaaaggagcaaactggagaaagtgaggaagtcaaatggtaaaggaaaatgtatgaatggtagcttgtgctttggaaaagttaggtgacagaaggaggcatgggctgaatgttgagaagtactaagagatagaactggaccacaaaagcgagtcacgagacaaacggagaaggggaaggacaggcaggccagggagaagacaagaagggtggatattaggatgaacaataagaaggatgaaggaaaacgaaaaaaagaagtagtcaaaagagagaaaagaaagagatgaaggaagcagagatgatgaaaacacaccacttagtaggatctcagcaaatgggggaagagaaacattttaaacgatggaggaggaggcgttgaaaaaaaaaaaagaaaaagcaattcacacaggagattcctaacatatgtaggtggcagtgttctggaggccatatggattatatagtttatggattcaaattattataaataacaggacatgtacaaatcaccaaaaaattattacactttcacggcaataaataaaacaattccacaattgttatactgttatatggataagtcttcattgtatgggattgagtggatgatatatgtatattacctcaactttgtagaggaaaagatttggagaaacaatttcaagaggggtggtttaaaggttgttgaagatgaaaacagtttcagtcacccaggatgacatataaaaatgcctaagtcagatgtagaaaattatgttaataaaagacccccagacaaaacctaaataaagattccctttgagtcatgtgtagggtagattatagatttgaaggacatagaatgtcataaagaagtagacacctgaaacttaatctcagtgcaaaaaaagctggaggaccaggacagggaataatcatggtctcaggtagtagagatgcagaatataaaagatagatgagaaaactagctttgatagcagcacaaggctaactagaggcagtatgcacaaggtgaggttggcctgccttaacccaggcccaaagaaatagactagatttgagaaactgaggtcagtggaaagtcaaaactacatcaagataaaagctgggaaagaggttctgaagcaccagcataacctgcagagatttgtgaaggagagatccttactgtatagaaactcatatgagatggccactttgagacagttcatcgaaagagactttgtgaaaggacatatggaccaaaagaggagtcaggaatgctgattggagaaatcagaaagtttcatggcaatctaaagttgccaacatggggaagacctcctacagatgaagtgatcaaagacaaaggggagaaagtctcatctctattacattatctttgaagaaaacggagacaggatgcaagcacagaagatggaacaagctgagctgtcgatcatatactgcctttttaaaatatactccatgttggtttcacacaaactccagataaaaaaagagataagagtgaagatgagctcctaggatctgtggggcagaagaaatagtcatatgctcctggcccactaggaaatacaatgcttgaagactggtagcttggggactgtgagttaaactgacttgatgtttttgggaggagttagtccccagcaagaaatcttgtgtctccaccagccatggtgactttcaggactggaaattctgtctctaggggccagagcctggaggccaataagatgtacaccctggtaccttgctgggcagctcttaaaggccagggctcccagaactgcctgcgggccccttgacctctaaggcccaaggggcaagctcagactggtgtttctagcccagacaggagtcagatctcccctgtgtgtgtaagagtgtcgttgggcctgttccagagcgttgcactcctcagctgtctgccctggaactcaacaacaagggccataaaacctctccaaagcctaaagaggtcatcattgaaggacctgtcctaaatgcctgcagagaggagacaggtgtagattaagtctcaaagaccaagtcctcagggaagagccacctagagaggtgaaacattagggacggaaaggctggagcgcgactgggttcctccaatttgctgcgacaagtttggctttccaaatactagcgcgtccgtctctttaaatcacagagcaatcggggttctggtgggcaagactgaccctgccgaccagatgcaggccgctagcgggaggcaagaaggaaaagaaggagacattatcaagatctctggcgtccactgaaggccctaatacccggccgcgatgaaccttccgaaaaggagccgcaggaaccccttttagattttatctaataaactgatagcaaagtatattgataaggcggaacccggagcaagtaacaatattcatccctaaaggaaggaaactaaaatttggggtctcgatgccgcacttctggctgtgtaagagtgacacgtggccctgggggcgggggtgccatctaagggtttcctctaaagcctcgggcgctggctataccaatgaagagggagaggcggagagcgcagcagcctgctaaagtaaagtgctgggctctccacctacctggtgcgcaccggcctgcgggctcggagaagttcccggaggagcagagggcacccaggcacggtggccagatccaggaactcataagctcacatcccctgggggttggagccccacgcggcgcaagaaccccgggcgctgagctccggggaacctgggagggaaggaggggcgagcgggtggggctgacttacctgcccgcagcagtcgctgcctctgtgttgtccgaatgtccctgcgcaccgcaaccagcaaaggcaattcggctttgctaactttggcctcgcacctccagagaagaggcgcgaactcgcaaaaggaaaggcgcgcacggttcctggagagaggtccccctgaacttgggaaggacaaggcaattaattctgctcgagaagttagtatttaaaacacccacgcaaaaatcataacggctattaaaacctcgaattcccgctttgaaagactccttacaccatccgggcggacaattcagacctacatgatttcatattgaagtcgctaacttctttcaggaaggacttcaaagctactgtataaattggacaagcataactgtcaatcgctcccaaacactgagaagaacttttactgaaacgaaggataaatgagagagtgtaaaagccaaaagggaagaagttgaaaactttaagtcagtacggagaagttttagcaattggtttccttaaacgggataacaaataaaccaacacttcagctgcccatcgcacttcatttaagtttgaagtaaccaaataacctgaactaccaaataacagtgcccttgggactctgcctcaaagaggtcggaactcgtgtttcagcaacaaaagcaaaaagcaaactgaataatgtcctgcgttccttaagatgtcattctgcaaaaggacaaggcattgtccctcgactttaagtggacagagaataacattaaatttcatttgaatctgcgtgtcatttctgttaggaagatcacagcggtagcgacagtagcggcagagcaccgccacaaaggaggtggggaaaagtggtaaaaatgcatgaacttttttccaaagaaaaataaagataaatcaaaaataagttttacagacatgcctttcctagcttaggaaagttaatttttaaatgcgcttctgctgtctaaggtgcaaagccaggctagggagtgcgtggctggaatctgcatgctgataagagaaggctgatgtacttacagtgacagagggcaggctgcgggagaaaagctgtttgtgttagcctgcgagttacccagggctgcagtgagagcagaagggaggagtgggagtgccagtctgcgtacaccttcaccgcgtctcattacatctgccagcctctctctccctctctctttcatttccacattccctttgttcctgaaaaaaaaaaaatctacacgtcacatcagagtccccagatgcagtctacaccaaagaaaaaaatgaataattcaatcaaactgtgcatagtctctaaggcaataaatctattacacttaaagaaacgaagggtaattaccaccatagaattaaaataaggccaaagaccagagaagtcgctgagtctgtggataaactcatccgtaaataaagtttcatttatttaatctttttggcatctcaaatggaaagtcagagaaagatttttaacttattttagaagggtactcacttctttttaaacacattgaggcgggggggcggggttgggagtggggggatggcgatgaagaaaaggagaaaaagcctggagtatactaccttgctcaaaaagctcccaaaggcagcgtggagcggcacagacacgaactaagacaatgtgtgtctgcggagcctgtacagggtccatttctcccccacgtcaccctcctccattcccctctaatgagacgcggatcaccctccactctcaccgacactgcagctctgcacaagggcagctggaatctgggaaccttacctgcagcaccaatacctaagagaaatcgcgcttccctgacactaacacgccatgccatccccacgcaccctgccaaagtcctgtaaccatctacttcttccatctgcctaagagaaactgtaaacgggatttcccccccacgattgaatggaagctctgtactgtaccgacttctggatttgccctgggttgagtttagggaatgtctggaaagaaaaaaagggaggaaaaaaggaggggggcagctcaagccttgtccaagttagtcagaaggcggtgttaggcaggaaagcgcctacgggaaaaacagctgggatgcagacgggctatggaaatctcagttctaggaaccgtgtcctttcgtcccggaggtaagattgtgtgactgcctcacgtttattctttcactgtctgtgtctctcttccccacccccaactacccctgccactcagatcagccggcatgcaccctggagaagggcacaaacacggcgggggctttatttttcaggtctctccactcataaattatgggtgtcactaaaacgagattagcaaatcttctaccgctggcggcggcaaccagagcctctgtcttgccagttgcgcactctgagacatctctcggtgcagagtggttccgaagccccagcccgctgggtcgctcggcctgagggctcaggtgatggagaggaggctcgcggcgtcccaaacgggttcggccaagggtttccaccccatcaccacttcccgctgcctccacgcgcgcgcgcggacccacgagcacacacacacgcacgcacacacacagacacgcgcgtattctgaaattctggccgaactcctcatctaaacggaagtccctttacagtcaattcagcccgctccagagcatcggggaaactagactgttccgtggatgaactgcgaggatgccggcggtcaggcttggccgagctttgtttacgtgcctaagtcgccaccttgaggtcgaggggaagactgcgcccagctaggggctgtagagacgaacccagctgacactggcccagcagccttggcgacctcccgggaccgcctgaaagagaagcaaagggagggcgccctgcgggcgggcgggccacgctaggcgccgtctgccctcagagactcgggctgacaggagtgagagctaaaacttccaactagctgaaaccaatagccgggaatcgagcgaaggcgaactctcccagcaaagtataaagcttcgggccaaagagtctgcagctccaagtcaggggctgcggctccgaaactccaaacactaactcccagggcagtggcagagggtgggggcagcttcgaagaggcataccaactgctccggtcctggccgaagaccgagctcccttctgcggtgacctcggctcagagctgactccgtactccctgggactcatctcccgcttcctctccaccttcggaacagtagacaaagggactcagggacgcggccagacccaaggtcacaaacggaggtctccgagacgagaattgcgtgcaagagaaggacgttcaggcagcccggccgcctgctgcgagagctgaacatttcccagctctatagtcgcccatttctcaggaaatcagtccttctgagtgtctaacaatggattaggtaaaataataatgattattaattatatcaatgattttctattttcccattcctacccctatggaagcctttttcgctcaccgttcttcctatattcacgccttgcactaaaagaatgccaggcttaagaacctcctagctaaatcctgaaataatttatcgcggttgttctttgttactcctggtcactgcctccaaggcttggggacatctgcaaggccacaccgtaggtcctcctcggtgaactgtgccccatgggttcctcagtcatttccctgctacttggatgcatagacattatttaaatatactttataaattgagaagaattctatttatttcaagaaaatgggacactagggaactattttgttttatatgagcataaatcagccctggctgactttggccgtgcccattcagtattttggtcaacaataaataaataatggtataaattaaaaattaaaaatatagccacagcaacccgatgctaatggacaacaagaaatgtcttctccaataaaagaagcaacaggcccccaagccggaccccactccctgtttcatgccacagcctatcaaattaacattggatagctcttccatttatgtggaaagctgaatgttaccgagaacagtactgaagtttcccagggaatcccaattatagaaacacctgtgctaagtaatgctattctaatccactatgaaaaccttaagtatgtaatagtcctcaaatcatctcatttcttagttgcagtggggtaggccaacctcatacaagaacattagacttgtacaatgtcctgagagccttaactcagagcgctcttggttttgccatacataatcctggcagttcattttatcttaaatggaaaaaatatacacatgaagtttaacataactggcagaaactaagccagggtaggaattaaacaaatccagtgactacaaaactggaacacaaatcacatgtgcagtcagggaccaattccattatttttaatcaaaaattctacaacataggagttgtcactattcagtctatattctccattttaccataaacagaatattgaatggcaaaatataaggaaatgaaaccaccataaataatgtgatagaaaccagaacattgtaaactcctaccaatttcccaaaaaacatacatgtcagctatatttttaacaataccagacctaatatttttgaagtgctatctgaaaatatatctatttattaaggtaatcgttgctttattgcttaaggcggccaaaactaacacttctgaaacatccagatgaaaagtgaaatttctatccatcatctaactgtttctcttacaatgatacacagaattttggaatttttttgaactgaaagttatctaaataattacacaagtaagtatgattatcacaataaaacacagaaaggaaaaatataagggttataggataataaccacagaaataaactttagtcactaaaattcaaagtacccctcatgataatatccttctgagatactgtgttatcttttcaccatcaagtaatgttaaagcttgcgcattccttcatacatgcctttctccatttatagacccacttgcctcttcccaaatctgaggttggccattcacaaagatgattaccatatcattcattatacattttagcccgcctagaaaaatttggtaaatcagtatagatcctttccaatacctaataaaagacaaagaaggaacacaaaagtaatgctgtaaaacttcccaccaataaatatgaaacaataacttattactagtctttaaaaatttgatagtttacctcagcagtttgttttattatttgttagcattgtgtttaaaactaaatttgactaaattctctaattttaaaatttgttacttaaaaatcttctttggaatcccatactattttttaaatttctaaatacaggatttcttttgtgtgcgtattttttttaacattacaatcatattggagactttgcttgttttccacaattttattcatgcttaaatatttactgagtgcctagtatgtgcaaaacaaataatgaaaagtatgttaactgtggatttatctttttacttttataatagatattaattcaaaatctattgcatatatactgaaaattaatttttattaaatatgccagcagaagcatcctgttcaatatttgataattccacaagatgatatttcattctatttggcacatactattgaaattacctgttatttttattaaccaacaaattgtatacatttctaaaaataagttttctgacttatcaaatgatatatctataaaaaacctttacttaaaaataggatgtatacttataagccagttccaaacaacatcttttaattttaaatcagttctaaaagaagactgaaactgtatttcaagtcaaagtgtttaatataattgctatgcaaagttattctataacttgctaagttttatgtctttagcatgtatcataatgatacatacaagatagagatgttatcttcccaaattcaaacaaacaaatgaaagctaaaaaataagtcagtgttcccaagtatctggatgtttgctattatataaatagctcattgggttttgttgaatttttacactttcatcagaatgttttctatgagtttgaacatattatgtttaaaatgggggaagggaggaagaaaacaatagcgtaaatctgcaacaatgatcatcctcatgttcattcatgtttgtttaagataataacaaatgaaaagcttcacttattcacgcttaaagttctagaatagtaggcttttgggggaaaatactaaactcaacagctcaatacaaaaacctcttttaattgcacacaatatgttatcaacctactttcaaagttgatgaagtttagtactaaattgaatattaagcaaataagtgttaactatgttcactagaattagcatatttcagatatttttaagagcatcagcatcatgatatggttgtcatagaaactgcaacaatatgtcatttcaattaattttatatgcagtgataaggcctagttctacatcacttcaatacaagtttgaaaagcagaaactgaaaagcagatataaacagtgaacagtaagtttccaatttctacccgtttagaaatagagtacgagccttttaaaaacaaaaattcacaatgcattccaatggcatgaaaaagatagcaatttaataaagattacaaaacattttaagagtacattctgaaaaaaaagtttttactaacaaccaaccacttctcttaatattccatactcttgttatttaggtctatttataggtaagaaaaattattggttattacattacttaattattaaattatggatgctctttctgttcttgagagataggtgcatttgcttttacattataaattcagaacaactagagcagaactttaatatttttaaagtaattattgcaagagatccttttcatttagaaggaaatcacactgtattattgcaaaagccttcttagtatatcactgtgagagatattctgttgacattaatggcttgattattggaacagaaaaagcctgtgaaaataaagcatatatttcctaaagaataattatggctgaagatttggagctcaaaattaatttgttatttagctaccaagtacctattctttatattttcttttattgcacatttcaatatggaatatgcccaagaaaactctgaaaatgatttgaaaagacacattagacttaagtctatatttatcatgcatctttttaacatataatatagcccatgttgccaataatttcaactaattactacaaagcaatatcctcaaaatatctattgaaatattgtcttaaaagtaatttttagaaagtgaatgaatactatgtgagtattttttttaatgaagtctaaaggagcagtctacagaagaaaagataaacatatgcaacttattctccttgataggattaggaggattccaaagaagcatttaaattccagttttcctgacaattaacaatgaaaaacagatgtttacaaagctgtttcgtatgcggtcttaaaagacgataaaagatggtttgtggatagtaagaaggaagagccggataactgcttgccgggtgtatatttaaaaagcattttcattggcttagttattgttaatagtgaaagaaaacactttgtgctgcacatactgtatgactgtgactatagaagactgccatcataaagtcctcaaaaactcttaagatgtaatttacaaagataataataacacagaattatttcacttctctgaatgctacacatttgcataccaggactgtgtacaatatactcataatgcacattcataataacaaggacttcttaactctataactacagcataagatctgtgcagtagacaatccatcttaccaagttttacttattggtgtgaaagtgttagtctcagtaagccaggtgttagctgtctacgaagttgaagaccacattaactactacatcaccattgtgagaaaatataatgataaaactgaaaatcgtgtgactttaccagacaataacactactagctagctaagattatatctaagataatgtcaaatgaatatttcaagagttggatgtgataatcatgagcccgtattaccaaaaaaaaaaagaaaagaaactaaaaatcactgatgtttgtccttgatattattatttattgaaccaggcaccatgctctgtgcttttttttttaatgtttaagttttaaaatagtcatttgggtatttttctttactcaaaatgatgaatcttcttcatgaggcattaatctcctgccccatgcctagtaactgcatatttggtatccactagagaaaccaaataaattctaattttggttattatccacgatgtctttcatttttattcagcagggaataagtatagtctaataaatgacagaaatatggtgtttctattgcctagaagagttattttctaaatttacttctgatacttttatattagtctaaaaggaaaagataatttttaaacaaagagagaaggaaaattaagcaagtggtacaatatgtaacggtacctggattagcacaaactgagcaaaaatatctaattaggaaaaatttctgaatatactaacacatttacatttcaaaactaaaatttcatttaacatgaaaaaatgcaacataaaataattacttgtccttataatttttattcaacattcaccacccatgggcatttatttatgtggatattattattgaaattgaatgtatttcactgttaagtttcaactatctcccaaattataataaagagtaaaacatattgatgtatttgactttattctattaagagttttttaaatgtaagctgattatttacatgagcattacaatttatataaagaccattattacttaaacataaggaacaaagaaattactttgaaccagcaacatttagtccttgatattatattagctaaaagattgttaaaaatcaccagtagacttctattatcctaccattacagctcaggtttaatagacaaggagaaatttgtaaaactactttggttttcaaaatcagtactagtacaaaatctcttaagtctaaattttatgagtgggattccaatgtttgtttctattctctttttaaaatagcttttgttagaataacattttatccattaacgtttaagaaatgattttgcaaagccaataagagatttaatgtatcactggttttttcatatgagtatatgttatctatctgggcatgacgatataaaaaattacaaggacttcctggatggcaggcagtgaaacacactataatcatcagcactggaaaaccctacattatgttgccctggttggaatcagactccagggattactgcctcaagcttcctgagtagctgggactacaggcccatgccaccatgcctggcttggaaaactctttaagtacaagatgtattcaaggttttcatcaaaatcaagtagttatatttaatatcaataaaactatatatgtctacatgagataggtgatcatatataattattttaccttgtagtcttttgacccagaatttcagcaattttgtgatttttccaaatacagcaatagaaaaatgaagtaccaacccacctttcctggaatagggccatatcaattggacctaggagaataggtacagggcctgctcttttttaattcattaaccttttttgccataattttatttgagccactacagccaccaactatcacaattttgtggacttgttcttattttatttcctactgtttcacaaatttcttctgtgcagttattaaaaatactatttcccttttatcatttgacaaatctaagcacccaaaatgtgaactttctcattctgctttcatttgtgtgcctatatttggaagagcatggagatttttttctaccaagatgaacagtatttgtaaacttacataagaggtgtcctgtaattaggaaacttgtttttggtctgtttgttacaatatttcacaagcaaagttatacatataacagttaacacttacagttacacaaggagggctcatgtactccttgtgatgtctgtatttattttctaatgtccttaaggtaaactaaaaatcctaaaatgaaagaactaagaacaatttatctgagctacttccaaatgtataggtgtgggtgctaagatataagaagagtaagaaaaagaaccatggtatctgcattccatgagtgtacagtttacaaccattccaagtcattccaacaattgcatggaatacattgactgtcatggtcattcaaatgtcacaagaaaaatatacaacctacaaatagtgggagtgagtaatatctcatttttcctgagagtatagtgttgtacataaagatgagctagagtattagatcgtcttaaaagtatagttttgtattcattggctatgtacatgtagatactatgctaaacaagagactagcatagagtttaataaatcaactattaaaattatttatacaaatcattcaactgcagaatttttttcaggtttccaagtttgtggtgtcctatagcatatctattaataagccttcattctaagtcattcctatctcctaacaactgcttctgtatttacaattgagaaaataaaagcattcctcataggagacatcctaagaatgcatatatgcaaagattctcatgaaattctatcagaaagagagacaaaaatcttgatatttcttacagacctgctgtcaagttatctgatttgactcattttttgctcaggcctgatttcttttaggtcctaaaaatatacttattttcacttatttgtaaaaatcagtaacagagcattgctaggtcatcttgtggatgccttttatttttaattgattttacttttcttaaagtaatgcttgcaaaaagtaaaaaattcaattttattgaaaagcttatgtgtgacaatggacctctaccacacctttccccaccctcattcatatgacccaaaggcaatcactgtcaagtcttttaagtgttacttttggtatttagctccacatttctaataatgtgctcataagtatattttaagcttttgtgtatactgatttattttatttatttcaataggtttttggggaacaggtagtgtttggttacatgaataagttctttagtggtgatttctgagatttgggtacacccaccacctgagccgtgtacactgtacccaatgtgtagtcttttaaccctcatcccctcccacccttttacctgagttcccagagtccactgtatcatttttatgtctttgcatcctcatagcttagttcccacttatgagtgagaccatacgatgtttggttttccattcctgagttactctgcttacaataatggtctccaattccatccagcttgctgtgaatgccatcattttattccttttaatgactgagtagtattccatcatatataaaccacaatttctttatccattcattgactgatgggtgtttgggctggtaccatatttttgcaattgtgaattgtgctgctataaacatgcatgtgcaagtctctttttcgtataatgacttcttttcccctggatagatacccagcagtgagactgctggatcaaatggtagttctacttttagttgtttaggaaatctccacactgtttttcatagtggttgtactagtttaccagcagtgtaaaaatgttctcttttcaccatatccacactaacatctatttctttttgtttgttttgttttctgattacggccattcctaaaaaagtaaggtagtattgcattgtggttttgatttacatttccctggtcattagtgatgttgagcattttttttttaatggagtctcagtctgtcacccagcctggagtgcagtggcttgatctctgctcactgcaaccttcacctcccaagttcaagcagttctcccacctcagcctctcgggtagctgggattacaggggcgcgccaccacgcctgactaatttttgcatttttagtagagacggggtttcaccatgttggtcagactagtctcgaactcctgacctcaggtgatccacccacctcagcctcccaaagtgctaggattacaggcgtgagccactgtgtccagctgctgagcattttttaatatgtttgttggccatttgtatgtcttctttggagaattgtctattcatgtccttagggcacttttttatgggatttttttttcttgctaatttgtttgaattccttgtagattctggatattagtcctttgtcagatgtatagattgtgaagattttctcccactcagtgggttgtctgtttaccccactgattgtgttttttgttgtgcagaagctttcgagtttaattaagtcccatctatttatctttgtttttgtcgcatttgcttttggtttcttggtcatgaactctttacataaaccagtgtctagaagggtttttctgatgtcatcttctagaatttttacagtttcacgtcttagatttaagtctttgatccatcttgagttgatttttgtataaggtgagagatgaggatccaaattcattcttctacatgtggcttgccagttatcccagcaccaattgttgacttgccaccactatctatatgaagtctccatgtctatattggtctgtttcttgcctttgtgttctgatttattaatctattttataaaactatacatctatataaacccaaactatcaagatatcgaagatttccatcatcccaaaaagatatctcctgccccttctcagtcaacacctaccccttcggaggcaatcatcattgtgattgctatcacagtagattagttttgcctattcttgttcattacaaattcttgttcttcatataaattcattatgtactcttgaatatagctttgtttactcaacagaatgttttgaatttcatccatgctgtcatgcatttcagtgaaagatttttatttttttattttatttatttatttatttattgagatggagtcttgctctgttgccaggctggagtgcagtggcatgatctcaactcactgcaatctctgccttccgggtttgaacgattctcctgcctcagcctcccaagtagctgggactacaagtgcgtgccaccacccccagctaatttttgtgtttttagtagagatggggtttcaccatgttggccaggatgatctcgatctcttgacctcacgatctgcctcccaaagtgctgggattacaggcatgagccaccgtgcccggcccatttttaattttgagtagtatcccattctatgtatatatgaccatttatttatcagcctgcattgatgaacatttgaattgtttccagttttggctaatatgaataaaactgctataaacattcttgtacaaatgtttttgtaaacatgttttctcaggtaaaaatcttagagtggaatttctagattttaattagatttatgtttaactttacaagttgccaaaccaatttccaaagtggtcatatcattttatattcccaccagcaatgtatgagaatttcaattgcctcgcattttacctatatttgatattgtccagtttgtttggtcagttttttaaaaatattagccattctagaggatgtgttttagttttaattctccagacactaatgacattgagcactttttcatatatttattaactatttgtgtataatactttttgagatgcctattcaaggtctttgatctttttttggtggggggagggttgattgtctaattttattgagttgtagaattgcttataattctgaatacaagacctttgccagacatgtttttgcaaatattttctccatggctgtgactcctctattcattctcttaacaatgtattttgatgagtagatgtttttaattttgataaagtccacattattagtttttttcttttatcactagttttctaggtcctgtctaaaaaacaaattccattatcttgtattgatgttgcaagattgcaaaagtagcctcttatgttttcatctagagattttatagttttatctttcacataaaagactttacattaaagtccctagccatctttaattaatttttttgtatagtgtgatgtacgagtgtgaaataagatgaaatccgtatattggtctctgcccccagttcctgatacagggctcctaaagccctcttgtaatttcttaagaggtaggagtgctaggagcatcttttgttctaatacttcatctttaaccttggttcctaacaacagagttcctaaaccgcttgacgttttctgtgtgagaggagcatcttttgttctaacaaggtgactcctgatgggctcctggattgagactgctcaccagaaataccaagccatgattagaagctttgaaattttagtcctataccccttcctctggggaaggaatgggggataggaattgaattaatagttcatcatgcctatgtagtgaagccttcccaaaaatccctaaaagattgggtttggagaacttccagattggtaaacacatgaaggtgctcagagggtggcacccttaagagggcgtaagagctccacaccctttccctgtgcatcttttccatctggctatttctaagttgtatggttttataataaaccagtaatctagtaagtaaactattttcctgagttctgtgagccattctagaaaattattgaaccaaaggatggggttgtgggaacttctgatttacagcaggctggtcagaggagcacaaatgcaacctggatttacaactggtgtctgaggtggtggcagttttttgggattgaactcttaacctatggaagctgatataatctctaggtagatcatctcataactgaattacatgctaggacacccactcaatgtctgctgaaaagtggagaattgcttggtgtgggaaaaataaaacccacacatctggtgtcagaagtgagctattcagagtagacatagagtagtgatggaaacaggagttttacttccaacaggcgaagctcattttttttccccatacagatagccagttgttctgacagcattttttagactatcattttctttggaattgctttggcactttggttgaaaatcaattgacaacataaatgtggatctatttctgaaccctctattctgttccagttgcctgtctacacataaatactacactgtcttgattaccataacattacactaagtcttgaagtcagaaagtttaagtcctccaaatttattctttttggttgttgttattttaggacactttcaattacatataaattttagaatcagcttgtcaacttttaccctcaaaaaagcctgctgggatttttattgggattttatttaatctatagataaattttgagaaaattgatatttaacaccaccaactttttcagtctgtgaaaatagcgtgtctctccagttagatcatctttaaattttctcagcaatgttctgtatattcaatgcagaggtcttaatcatatttcattaaatatatccctatgtattttatgtctggatgttattataacagtattttttaaatttattttttccaacttttattttggattcaggagatacatgtgcaggtgtgttacctgggcatactgcgtgatgctgaggtttggggtacaaattatcccatcacccaggcagtgaacataatacccaatagtttttcaacccattcccacctccctcccgtctcacattagtagtcccagtttctattactggaatctttatgtacatgtgtactcaatatttaactcccacttattagtgagaacaggtggtatttggttttctattcctgtgttaattcgcttaggataatgacctccagctacatccatgttgctgcaaaggacatgattgcattcttttttatggctacatagtattctatgttgtatacataccacattttctttatccagtccaccgttgatgggcacctagattggttacatgtctttgttattgtgaacagtgctacagtgaagatgcaagtgcttgtgtctttttggtagaataacttgttttcttttagatgtacaccaagtattgggatagctgggttgaatcatacttctaagttctttgagaaatctccaaactgctcttcacaatagctgaactaatttacatctccaccaacaacgtataagcctcgccagcatttgttgttttctaactttttaataatagccattccaacttgtatgagatgatatctcattgtggttttaatttgcatttctctgatgatcactgatgtggagcattttttcacgttttttggccacttgtatgccttcttttgagaagtgtctgttcacgtcttttccccatttttaagggggttatttgtgttttccttgttcaattgtttaagctccttctggattctggatattagacatttgttggatgcatagtttgcaaatattttctcccattctgtgggctgtctgtttactctgttgatagtttattttgcatgcagaagctcttcagtttaattacgtcccaattgttaatttttgtttttgttgcaattgcttttgaggacttagtcataaattctttagcaaggctgaagtccagaatggtgtttcctaggttttcttctaggtttcttgtactttagggtcttatatttaaatatttaatccatcttgagttaatttttatatatggtgaaaggtataggtttagtttcattctgcatatgactagccagctatcccagaatcacttattgaatagggagtcctttccccattgcttatttttgtcaattttgtcaaagatcagatggttgtaggtatgtggctttatttctgagttctctattttgttccattggtctatgaatctgtttttatggcagttccatgctgttttggttactgtagccttatagtatggttggaagtcaggtaatgtgatgcctccagctttgttcttttttcttaagattgctttggctacttgggctcttttctggttccatatgaactttaaaatagtcttttctagttccgtgaaaaatgacattggggccgggcatggttgctcacgcctgcaatcccagcactttaggaggccgaggtgggtggatcacttgaggtcaggaggtggagaccagcctggccaatatggtgaaaccacatctctactaaaaatacaaaaaaattagctgggtatggtggtatacaccagtagtcgcagctacttggaaggctgaggaagaatctcttgaacccaggaggcggaggttgcagtgagccgagatcacaccactgcactccagcctaggcgacagcaagactccatctcaaaaaaaaaaaaaaagaaagaaaagaaaagaaaaatgacattggtattttgatagggattgcaatgaatctgaatctgtaggttgctttgagcagtatggccattttaacgatattgattcttccaatgcatgagcatgaaatgtttttccatttgtgtcatctatgatttcttttagcagtgttttgtatttctccttgtagagctccttcacctccttggttagatatattcctagatatttcctggatatgactactgtaagtggctctcagcttgaacattattggtgtatagaaatgatgctgatttttgtatgttgattttgtatcctgaaactttactgaagttgtttatcagttccaagagccttttgccagagtcttcaggcttttctaagtatagaatcatataatctgtgaaaagagtttgacttcttcttttcctatttggttgactttcatttctgtctcttgcctgactgctctggctaacacttccagtactgtgttgaataggagtggtataacagtgggcatccttgtcttattccagttctcaaggggaatgcttttagtttttgccattccagcatgacattggctgtggtgcgtaatagatgggtctttttattttgaggtatgttccttcgatgcctagtttcttgagaatttttaccacgaagcgatgttggattttatcaaaagctttttccacatctattgagatgataatatagtttttgtttttaactctgtttatgtggtgaatcacatttattaatttgtgtctgttgaacaaaccttgcatttgagaaatgaaacctttttatcgtggtgaattaactttttgatgtactgttgggtttggtttgctattattttcttgaagacttttgtgtctatactcaccaggaatattggctcattgttttattttttcattgtgactttgccaggtttgggtatcagagtgatgcttacttcatagaatgagataggaaggagtccttcctcctccatttttggggatagttttagtagaattgataccagctcttctttgtgcatctagtagaatttagctgtgaatccatccagctgaggctttttgtttttggttggtaggctttttattactgattctaattcagaactcaatcttggtctgttcagggtttcagttgcttcgttattcaatcatgggaggttgtgtgtttctggtaatttatcaatttcctctagatttgatagtttgtgtgcatagagatgttcataatattttctatggatattttgtatttatgtgggatcagttgtaatgtcaccttttgtcatttctgatggagtttatgtgaatcttttttttctttgttaatctagctaatggtctatcaattttatcttttcaaataaccagctcttagtttgttgattctttgtatggatttttgggtctcaatttcattcagtttcactcagattttaattatttcttttcttctgctagctttggggttagtttgttcttgtttttctagttcctgtaggtataatgttagatcattaatttgatatcttgctaactttttgaggtaggcaattaccactataaactttcctttcaacattgcttttactgcatcccagagattttggtatgttatgtgtctgttttcatttttttcaaataatgtgtttatttctgccttaatttcattgtttacccaaaagtcatccaggggtaagttgtttcatttccttataagtgtgtgtttttgagggatcttcttggtattcacatctatttttattccactgtggtctgagagtatagttggtataattttgattttttttaatttattgagacttgctttatggtcaagcatgtggttgatcttggagtatgttctacatgcagatgagaagactgtatactctgtggttgatgggtggattgttctgtagatgtctattaggtccagttggtcaagtgacaagtttaagtctaaaatttgttagttttctgcctcagtgctgtctaatgctgacagtcagggtgttgaagttccccactattattgtgtaactgtctaagtcttttcataggtctagaagtacttgttttatgaatctgagtgctccaccattggatgtgttatatgtaggacagttaagtcttcttgttgaattgaaccctttatcattatataatgcctttctttgtctttttttactatggttggcttgaagtctgttttatctgatgtaagaacagtgatccctattctttattgttttccatgtgcatgacagacctttctctaaccctctactttgagcctatggatgttgttatgtgtgagatgggtgtcttcaagacagcagacagatgagtcttgttttctaatccaaactttccactctgtgccttttaagtggggggtttaaagtatttacattcaaggctaatattgatatgtgaggtttgatcctatcataaggttgttactttgttgctttgtagtttctattgcgtggttgctttataaggtctttaggctatgtacctaagtgtgttttggtggtagatggtatcattcttttgtatgcatgtttaaaactcccttaaggatctcccgtaaggttggtctaatgataacaaattcacttagtgttagcttgtctggaaaatattttttatttctctttcacttataaagcctactttgacaggacatgaaattcttggttggaatttctttcctttaagaatgctgaaaataggcccccaacttcttctggcttgtaaagtttctactgaaaagtccactgttagcctgatgggattccctttgtacatgacctttctctagttgcctttaagattttttctttagcattgaccttggacagtctggtgacaatatgccttggtaaagttcactttgtatagtattaggcaggtgttctctggatttcttggatctggatgtctacctctctagcaagattagggaaattttcttaaataattccctcaaatatatattccagattgtttactttttctctttatctctcagaaatgccaataattcataggtttggttgctttacataattccatatttcttgaagactttgtacattttttttaaattctttttctttatttttgtctaactgggttagttacaaagactggtcttcaagctctgaaattatttcttcttcttggtccagtttattgataaagatttcaattgtatttcaaaattctttaagtgagtttttcaattgcagaagctctgatttattttttaaagacacttatctcttccttcgtttctaggattgcttgagaagtttatttgcattgactttcaaccttgtcttggatctcattgagcttccttgcaatccatgctttgaattctttatctgtcatttctgagtttccattttggttagggtccattgctagagagctaatgtgatcctttagtggtgtcattacattcagatttttcatggtgccaaaattcttcctttggttccttctcatctggagacactgacacttctaatttttgtaattattttcatgtgggtaggattttttctttttctctttttccctacattactgggggttttttctttccctttcccccaaggtctgctggctttgcttctaaagtcccatgcacttctttgggcaggttttgtattggactgtgcagtttgacctacaagccagtagatggcacttatcaataacagtcagcttttagcttgtctggaaaatattttttttccacacagctgggtacatacttcctccttgtttactggccgaagctctctgttgcctcaggcactggactgattcctgcgcagtggtctgagcttcctgctcagccctggggcagggtgaaggggccactatgggcagggtcagactgggcaggtctctgcctaaaggtccccggagggcaggcacaagcaccagcactgagggagaatcgaataggtgagcaccaagcactcagacgtctgcctaagcatggagcaaagcaacctcctcggccctctttggcacaggaatggggtgcagcctaaattcctaatccaaaagagtgagtggtccagatgtccggagatctgcctaggcgtggagtggagagggaccccctgcaccaagatttctgcacaggaggagcggagtggctcaggcttctgaaccaggcaagcagatcctctgaatgcctgaggatctgcctgggcatacagcagagagggcttccctgcaccaggatctctgcacaggaagggtagggttgctcaggctgttgatccaagtgagctggtgctccaaattcctggggatctgcctgggcatgaagtggagagggcctccctgtaccaggatctctgcacaggaaagctgggatgggtagggtcaagctgctgaaccaggagaacaggtgctccaaatgcctggatatccacctggacatggagttgagagggccctgccacaccatgatctaaatagtatttttaatactgtaatttgttgttttctaatatttattcagaattttcccatcaaactgcataagtgacactgagcacagttttttacttcctggaactaacttattcattttattgtcaatgctatgctacctgcaaaattaaattaaatttctggatgtatgttcctctctttatatattctctgaaacagtttaaaatcagaattactgccacttccagtatggggaagtaaactcgtaacaggaccttaaccttccacagaaaacaactataaattctgacaaaatgcaaaaaacaactacctgagagctctgaagaataaataaaagcagagttgaaacttgaaagaagctgtgggtgtaagtgagtttcccactttgtgtggctttgtcttgaaggcagccacagacccagagcagcatggaacagctaaaacttcaatagaaagcacagtgtctttatagctgggaaaagcaagggaaagagtcaaggtaatcagggccaccagagagtaaggaaagaatcctgaataggagactgtcagggaacaggaactccaaattccatatataactcttgcctaagtctctggcatatatggggccgactaaaatcaaccagaaatgacagttgagctgttcccaatcaaaggcaagagaaacttctcagtttaaatctaaccaagctaattgccttataaaataaaaacatcagcttcatttgtaggactataaaataatctaaaagctaagcaacatgatatcataatgatcaagattcaatctacaatttcttgacatgaagaatcaggaaaatgtgattcattttctagagaaaagatgatcaacaaacaccaatcccaaaatgaaccagatgctgaaattatcagacaagaactttaaagctgctattataaatatgcttaatgaaataaaagaaaatatgttcataatcaatgaaaaagtagcaaatctaagcagagaaataggaaatacaaaaggaaaaaagagaaacttaggactggaaaataaaaaatctaacataaagttcattatatgaacatagtaaaataaaggtgatggagggaaaagtctgtgaatttgtagatcaataaaagcaattagaagaaaagagaagaaaaaaatggaagaaaaaaaaaacagtgccttaggaatttgcatggcaatatcaaaagatccaacatgaaagctggagtctcagaaagaggagaaagagagaatggggaaataagaatatttgataaaataatggtcaaaagattctcaaatttggtgaaaaatagaaattatttgttcctcacatataaaactgagcttagaatttattttaatttattgtattatttgaatgtagcttactaggttttatttaatcaagtctattgatttagtgggtactgattattaaggttttttatgtttcagtaaatttagtagcttacatttttctagaaaatttctattttatctaacttttcaaattatttttagttttccattgtaatgtttaaatttttctattttatctctaattgatatggtttggctgtatctccacccaaatctgatcttgaactgtagttcccataatccccatgtgtcgtgggagggacccagtgaggggtaatcgaatcacgggggcagttacctccatgctgttctcataatagtcagtgagttctcacgagttctgatggttttataagggttttttcccacccttcactctgcacttctccttgctgcaaccatgtgaaaaagaagatgtttgcttccccttctgacatgattgttagtttcctgaggcctcctctgccctgcagaactgtgagtcaattaaacatttttcctttataaattacccagtcttgggtatgtccttatagcaccgtgagaatggactaatacagtaaattggtaccaggtagtggggcactgctgtaaagatactcaaaaacgtggaagcaacttcgaaactgggtaacaggcagaggttagaacaatttcgagggttcagaagaagataggaaaatgtgagaaactctggaggttcctagagacttgttgaatggctttgaccaaaatgctgatagtgatatggacaataaagtccaggctgaggtggcctcagatggagatgaggaacttgttgggaactggagcaaaggtaactcttgctgtgcaaagacagagtggtggcattttgcccctgccatagagatctgtggaactttggacttgagagagatgacttagtgtatccggcagaagaaatttttaagccacaaagcattcagggtgacagagcattaaagtgtggaaaatatgcagtctgatgatgcagtagaaaacaaagacctgttttctgggggagaaattcaagccagctacagaaatctgcataagtaagaaggagccaaatgctaatcaccaagacaatgcagaaaatcagacacttcacagctgcccctcccatcacaggcccagaagcctaggagggaaaaatggtttcctgggtgaggtccagggcccccctcttgtgtgcagcctctggacttggtgtcctgaatcccagccactccagctgtggctaaaaggagttcaggccattgcttcagagcatgcaagccccaagccttggaagcttccacatggtgttggtcctgtgggtgtgcagaaacaagaattgaggtttgggaacctctgtctagatttcagaaaatgtatagaaatggctagatgtccaagcagaggtgtggtcctggggtggagccctcatggagagcctctgctagggcagcgcagaagggaaatgtggggtcagagcccccacacagagtccccaatggggcactgcctagtggtgctgtgagaggaaggccaccatcctccagacttcagaatggtaaacccactgacagcttgcaccatactcctagaaaacccacagacattcaataccagtcatgaaagcagctgggaggggggctgtgccctgcaaagctacagggtcagagctgcccaaggtcatggaagtccacctcttacatcagcaatacctggatgtgaggcatggagtcaaaagagatcattttggagctttaagatttgactgtcccaccggatttcagacttgcatggtgcctgtagcctcttcgttttggtcaatttctcccattaggaatggctgtatttacccactgcctgtaccctcattgcatctaggaagtaagtaacttgcttttgattttacaggctcataggtagaagggacttgccttgtctcaaataagactttggacttggacttttgagttaatgctggaatgagttaagattttgggggactgttgggaaggcatgattgtattttgaaatgtgaggacatgagatatgggagggcccggggcaaaatgatatggattggctctgtccccctaccccaaatttcatcttaaactgtagttcccataatccccatttgttgtgggagggacctggtgggaggcaattgaatcatgggggcagttgcctccatgatgttctcatgatagtgaattctcacatgatctgatggttttataagggagttttcccacccttcattctgcacatccttgctgctgccatgtgaagaaggacatgtttgcttccccttctgccatgagtgtaagtttcctgaggcctacccagctccacagaactttgagtcaattaaacctctttcctttataaattgcccagtcttgggtatgtccctatagcagcctgagaacagaataatagactaattatgtccccttttcctctgctagtgtttaatggtgtcttcattatttttgttgttgattagtctctctagaaattggcctatttttttttgaaacaacaagcttttggattcttgatctctactgtttcttccttactttcccattcatttatattcttaatttatttcaagttcttttttagatttactattcttcttattccagcttcttcagccaaatacttatctttttattttgagatgcagtcttgctctatcgcccaggctggagtgcagtggtgtgatctcagctcactgcaccctccacctgctgggttccaacgattctcctgcctcagcctcctgagtacctgggactacaggcgtgcactaccatgcccagctaatttttgtatttttggtagagatggggtttcaccatgttggccaggctggtcttgaactcctgaccttgagatctgcccgcctcagcctcccaaagtgctgggattacaggcatgagccaccacacccagcttttcaatagtttcaaaataaatttattaaactataaatttccccaaataactgctttagttagatcccaaaaacactggatgttgattagggtaaatgattgaactactataataaacagaatgcaatagacaatggatcgaataagatgccttatttccttctcatctaagaatgagggtgggtattccaaggtcacggatatgtctggatcctaagctaatgaagccttggccatccttaaaatatatttctcaaggtcgctttggtcaccatcattccagcaagcagggaaaggtacagtgtgcaggaatatgtgtgcaacgttttataggcaaggcctggaaggaaaaatgttttttccattcacatttttttggacatagggtctcattctttttttttttttttatactttaagttctagggtacatgtgcacaatgtgcaggtttcttgcatatgtatacatgtgccatgttggtgtgctgcacccattaaatcgtcatttacattaggtatatctcctaatgctatccctccccccacccctcaacaggccctggtgtgtgatgttccccttcctgtgtccaagtgttctcattgttcaattcccacctataactgagaacatgcggtgtttggttttttgtccttgcgatagtttgctgagaatgatggtttccagcttcacccatctccctacaaaggacatgaactcatcattttttatggctgcatagtattccatggtgtatatgtgccacattttcttaatccagtctatcattgttggacatttgggttggttccaattctttgctactgtgaatagtgccgcaataaacatatgtgtgcatgtgtctttatagcagcatgatttataatcctttgggtatataccaaaggattatacccagtaatgggatggctgggtcaaatggtatttctagttctagatccctgaggaatcaccacactgacttccacaatgattgagctagtttacagtcccaccaacagggtaaaagtgttcctatttctccacatcctctccagcacctgttgtttcctgactttttaatgatcaccattctaactggtctgagatggtatctcattgtgggtttgatatgcatttctctgatggccagtgatgatgagcattttttcatgtgtcttttggctgcataaatgtcttcttttgagaagtgtctgttcatatctttcacccacttgttgatgaggttgtttgtttttttcttataaatttgtttaagttctttgtagattcttgatattagccctttgtcagatgagtagattgcaaaaattttctcccattctgtaggttacctgttcactctgatggtagtttcttttcctgtgcagaagctctttagtttaattagatcccatttgtcaattttggcttttgttgccattgcttttggtgttttagacatgaagtccttgcccatgcctacatcctgaatggtattgcctacgttttcttctagggtttttatggttttaggtctaacatttaagtctttaatccatcttaatttttgtataaggtgtaaggaagggatccagtttcagctttctacatatggctagccagttttcccagcaccatttgttaaatagggaatcctttccccatttcttgtttttgtcaggtttgtcaaagatcagatagttgtagatgtgtggcattatttctgagggctctgttctgttccattggtatatatctctgttttggtaccagtaccatgatgttttagttactgtagccttgtagtatagtttgaagtcaggtagcatgatgcctctagctttgttcttttggcttaggattgacttggcaatgcgggatcttttttggttccttacgaactttaaagtagttttttccaattctgtgaagaaagtcgttggtagcttgatggggatggcattgaatctataaattaccttgggcagtatggccattttcacgatattgattcttcctacccatgagcatggagtgttcttccagttgtttgtatcctcttttatttcgttgagcagtaatttgtagttctccttgaagaggtccttcacatccgttttaagttggattcctaggtattttattctctttgaagcaattgtgaatgggtgttcactcatgatttggctttctgtttgtcttttattggtgtatgcttatgatttttgcacattgattttgtatcctgagactttgctgaagttgcttatcagcttaaggagattttgggctgagacgatagggttttctagatatacaatcatgtcatctgcaaacagggacaatttgacttcctcttttcctaattgaataccctttatttccttctcctgcctgattgccctggccagaacttccaacactatgttgaataggagtggtgagagagggcatccctgtcttgtgccagttttcaaagggaatgcttccagtttttgcccattcagtgtgatactggctgtgggtttgtcataaatagctcttattattttgagatacgtcccatcaatacctaatttattgagagtttttagtatgaagggctgttgaattttgtcaaaggccttttctgcatctatagagattatcatgtggtttttgtctttggttctgtttatacgctggattacatttattgatttgcgtattttgaaccagccttgcatcccagggataaagcccactggatcatggtggataagctttttgatgtgctgctggattcggtttgccagtattttactgaggatttttgcatcgatgttcatcagggatattggtctaaaattctctttttttgttgtgtctctgccaggctttgctatcaggatgacgctggccttataaaatgagttagggaggattccctctttttctattgattggaatagtttcagaaggaatggtaccagctcctccttgtacctctggtagaattcagctgtgaatccatctggtcctggactttttttggttggtaagctattaattatagcctcaatttcagatcctgttattggtctagtcagagattcaacttcttcctggtttagtcttgggagggcgtatgtgtcgaggaatttatccatttcttctagattttctagttaatttgcgtagaggtgtttatagtattctctgatggtagtttgtatttctgtgggatcggtggtgatattctctttatcattttttattacatctatttaattcttctctcttttcttctttattagtctggctagtggtatatcaattttgttgatcttttcaaaaaatcagctcctggattcattgattttttaagggttttttgtgtctctatctccttcagctcttctctgatcttagttatttcttgccttctgctagcttttgaatttgtttgttcttgcttctctagttcttttaagtgtgatgttaggttgtccattttagatctttcctgctttctcttgtgggcatttagtgctataaatttccctctacacactgctttaaatgtgtcccagagattctggtatgctgtgtctttgttcttgttggtttcgaagaatatctttatttctgccttcatttcgttatgtacccagtagtcattcaggagcaggtgttcagtttccatgtagttaagcagttttgagtgagtttcttaatcctgagttctagtttgattgcactgtggtctgagagacagtttgttttaatttctgttcttttgcatttgccgaggagtgctttacttccaactatgtggtcagttttggaataagtgcggtgtggtgctgagaagaatgtatatgttgatttggggtggagagttctgtagatgtctattaggtccacttggtgcagagctgagttcaattcctggatatccttgttaactttctgtctcattgatctgtctaatgttgacagtggggtgttaaagtctctcgttattattgtgtgggagtctaagtctctttataggtctctaaggacttgctttatgaatctgggtgctcctgtattgggtgcatatatacttaggatagttagctcttcttgttgaattggtccctttaccattatgtaatggccttctttgtctcttttgatctttgttggtttaaagtctgttttatcagagactaagattgcaacccctgcctttttttgttttccatttgcttggtacatcttcctccatccctttattttgagcctatgtgtgtctctgcacatgagatgggtttcctgaatacagcacactgatgggtcttgactctttatccaatttgccagtctgtgtcttttaattggagcatttagcccatttacacttaaggttaatattgttatgtgtgaatttgttcctgacattatgatgttagctggttattttgctcgttagttgatgcagtttcttcctagcctcgatggtctttacaatttagcatgtttttgcagtggctggtactggttgttcctttccatgtttagtgcttccttcaggagctcttttagggcaggcctggtggtgacaaaatctctcagcatttgcttgtctgtaaagtattttatttctctttcacttatgaagcttagtttggctggatatgaaattctgggttgaaaattcttttctttaagaatgttgaatattggcccccactctcttctggcttgtagagcttctgccgagagacctgctgttagtctgatggacttccctttgtgggtaacccagggtaacccagcctttctctgtggctgcccttaacattttttccttcatttcaactttggtgaatctgacaattatgtgtcttggagttgctcttcttgaggagtatctttgtggtgttctctgtatttcctgaatttgaatgttggcctgccttgctagattggagacgttctcgtggataatatcctgcagtgttttccaacttggttccattctccccgtcactttcaggtacaccaatcagacgtagatttggtcttttcacatagcccatatttcttggaggctttgttcatttctttttagtcttttttctctaaatttctcttctcgcttcatttcattcttttgatcttccatcactgataccctttcttccagttgattgaattggctattgaagcatgtgcatttgtcacatagttctcatgccatggttttcagctctatcaggtcctttaagggcttctctacattggttattctagttagccattcatctaatcttttttcaaggtttttaacttctttgccatgggttcgaacttcctcctttagctcagagaagtttgatcgtctgaagccttcttctctgaactcatcaaagtcattctctgtccagctttgttccattgctggtgaggaggtgcgttcctttggaggagaagaggtgctctgatttttagaagtttcagtttttctgctctgttttttccccatcgttgtggttttatctacctttggtctttgatgatggtgacgtacagatggggttttggtgtggatgtcctttctgtttgttagttttccttctaacagtcaggatcctcagctgcaggtctgttggggtttgctggaggtccactccagaccctgttggcctgggtgtcagcagcggaggctgcagaacagcgaagattggtgaacagcaaatgttgctgcctgatccttcctctggaagttttgtctcagaggggtacccagccatgtgaggtgtcagtctgcccctactggggggtgcctcccagttaggctactcaggggtcagggacccacttgaggaggcagtctgtccattctcagatctcaagctgtgtgctgggagaaccaccactgtcttccaagctgccagacagggacatttaagtctgcagaggtttctgctgccttttgtttggctatgccctgcccccagaggtggagtctacagaggcaggcaggcctccttgacctgtggtgggttccacccagttcaagcttcccagccgctttgtttacctactcaagcctcagcaatggcaggcacccctcccccagcctcgctgccaccttgcagtttgatctcagactgctgtgctagcaatgagtgaggctccatgggcataggaccctccgagccaggcgcagaatataatctcctggtgtgccgtttgctaagaccgttggaaaagagcagtattagggtgggagtgacctgattttccaggtgccatctgtctagcccttggctaggaaagggaatttcctgaacccttgcacttcctgggtgaggcaatgccttgccctgcttcagctcacactcggtgcactgcacccactgtcctgcacccactgtctgacactccccagtgagatgaacccagtacctcagttggaaatgcagaaatcatccatcttctgcatcgctcatgctgggagctgtagactggagctgttcctattcggccatcttggaaccaccactgacatagggtctcattctgtcacccaggctggagtgcaatggtacaatcatggctcactgcagcctcaacctcccaggctcaagcaatcctcccacctcggcctcccaagtagctgggacccccagcatgtgccaccacacctgctaatttttctattttttatagacacagggtttcaccttgttgcccatgctggtctcaaactccagagctcaagatatccgcctgcctcagcctctcaaagtgctgggattacatatcacccaccatacctggcccatttccagtcacaatcttttgatataaatcaagttatataaccacacctagcaacaaagtaggctgaaaatttagtctttggtgagacaaccctattatagccctattacaataaacaggaaaatttttgcagcagtctctaccacatgtatcttcactgatgttcatatctgtaattcctattaaaatttcttttttatttcatgaattattgacaagtgcattcatttcattccaaggttattgggggggtagagatttaaactattattgactcataagttaatgacactgtgttaattctactgtgtataatattctctgaaatttttgtaatattatataatcaattgtcttgaaaactccacagatacttgaaaagactatatattctctgtttgttgggtgtaggagtccatagtatctatagatcaaacttgttaattgtattgttcaaatcttttatatgctttctaaattttattcacttggtctatcagcccacaatatgcctgctcacttttcattggcaaaattttgtcacattgtctaggataaagtcaatgggggcagaggagtatactgtagctgaatgtatttcctagagaccattttaatccaatcagagggtttaacaaaagatgtgattgatatactacttttaattacgtcttttccctaaggatgtatcttaatttggggctctttcagccttcatgtatcgggaatatttctcaacacatttaattggttggacatgagaaatattcattcgtcatccttacaatcacagatttcctggattctgttttccttttcatcccagctttcaatcaaattttttttctgtattttatcaaatgccactaataacaaccaattcaagctggcaacatactgtctccaaatctctttgcacaaatcgcaagttcacttggtatattttctgctttacccgttgtttcaccactacaaaacatgtccatgtttacaggttcctagaatagttttttaccacctgcatcttggtcaccacatatttcgggtttttattacatgaacatccaatttctagatatcaatttatgtattagtgttatgggttgaattgttgtccccccactgaaaaaaatctgttgaaggctaaacataaagacctcagaatatgaccttatttggaaacagggtgattgcagatgtaatgagttaagatgatgtcataccagagcagggtgggtccttaatccaatatgactagtgttctcataacaaaatggccacatgagaacacagacatacagagagaatgccatatggcaacaaaggcagagattgggaattatgcagctgcaagccaagaaacaccaaagatttctaacaaaccagcagaagctaagaagaggcaaggaaggattccaccaggtttcaggtggagactggccctctaacaccttgatttcagacctctggtctctagaactgtgagaataaaattctgttgttttaaaccatccagtttgtggtactttgttacagcagccctagaaaacaaatatacttagtgaacaagtgttacagtaaagctgaatttatttaaaaaaaaaacaaactcaatggcttaaaaaaataaatgttatcttattctcacagatctgtgtgttggctgtgactctgttgggctctactggacttggctgggctcagcttcagacttgaggtcatgttcagatgttctccaagtaccttttcattctgggttccaggctgaattaacagcctcacctgggacaaggtgtttttatgacagagagaaaaagcacaagagttcaagacaaatcacacaaacatatttaaagcctctgctcagatgtggcattggatacatccccataaactctactggcaaaacaaagacacacagacttgtggcaaagctctaagtcaatggcgaagagaagcactggccttcaggtaagtgtgggaaggtgagaaaggtataaataacaactaatataatatgttgtgtttattctatttatatttactgtgattactcatatgtgttgctatttatatcatctaattttgtgtcttaggtttatcatcctttcgtaagtttttttattttctttgttttttttttttatttccataggtttttggggaacatgtggtatttggttacttgagtaagttctttaatggtgatttgtgagattctggtgtacccatcatctgaggagtatacactgaacccaatttgtagtcttttatccctgactcactcccaccctttcccctgagtcccacagcccattgtataattcttatgcctttgcatcctcatagcttagctcccacttatgaatgagaacatatgatgtttggttttccattcctcagttacttcacttagaataatagtctccagttccatccaggttgctgtgaatgggcatttggctggttccagatttttgcaattgccaatcatgctgctataaacatgcatgtgcaagtatcttttttgtataatgacttatttttctctgggcagatacccagtagtgggattgctggacgaaatggtagttctacctttacttctttaaggaacctccacactgttttccatagtagttgtactagtttacattcccagcagcagtgtataagtgttcccttctcactgcatccacaccaacatttattatttttttatttttgattatagtcattcttgcagaagtaaggtagtattgcattgtggttttgatttgcatttgtggatattagtcctttgtcagatgtatagattgtgaggcttttcacccactctgtgaattgtctgtttactctgctccctgttccttttgctgtgcagaagctctttagttttatcctcctttcctatcttcttgagactgatatgatttctatgcccctccccctttccctctctgctaatttgaatgctatagatagtatgtccatttatttaatggttacccttaatgttgtttaatatacttgactataaatattacaaaaatatctaaaggtattcagtatatatatccccctccttaaatagcatgatccttgtcatgctttacccaataaaaggcaacttctggagaagcgggaaagatggcatataggagacagggctaacgtgcagctcccacatggacaaacaaaacagtgtgtggagactcacaccctgatcttttgctccaagaaccacagaagaaatgtactagaaaaaccaaaagaattcacagactctttgaaagaagtgacatgctgctgtaagttccatgaaacaggtggaaaactgtgagttcccaaagtgtgagacaggggacctacctctgaacccacatccccactggggactcttaaaattcaaatcacaggagaaggacttaaccttatctagagataaaatggattcaggaagtcatgaaaaatataaaaatagaagtagcagcaggaagtgccttgcatgcactcccaatccccagcttgagcccagggaagccatccctgactatatcttacagggacccttggggaaggcagccagtggaattgtgggggaggggctcacagggtgaaggaagtttccaactgaaattggtagtaggttcaactgggcacaaattttcttgagcagagtctgagggacgagtgggagtggctgtggatatgagtgagtgcaggagtgtaggagctgctgcagacagagtaggcagactggaaagggtgaggtctgaaagccaggttgtttcttagcagggtagctcatggcctggggtaaggtttcagcatggcaccatggagcaagactagcctttccaactatgtgggagctagctgaggccacttgctaccactatcccccacttgcctggacacagcaaaggcagccataattccctctagaacataaccccatttaccagagaatcaccccccaaccctcacagtggccatggcaggccccacccaaggagagtctgagcccagacccacctaatcctgcccccacctgatggtatttccctacccaccctggtagccaaacacaaaacagaaactcctgggagcccatcacctgagaaaccaaaatacttaccctggacatgttagggcaagcttagagccccctaccactacagcagctagtgttctcttgaaactgccaccttctggctggaggccaaccagctcaggccattacaacaactcattacagaataaccctgatcccaggaagaagataataccaattccactgcctataacatcctgaaatagtctacccaaatgagaaggaactagaaaagtacttctggtaatatgacaaaatagggttctataccacccccaaaagatccccagcaataaatccaaaccaagaagaaatctctgaattgccaaataaagaattcagaaggttgattactaagctactcaaggagataccaaagaaaggtgaaaacaaacttaaaaattatatttaaaaaatacagaatatggatgaaaaattctccagagaaatagatatcaaaaagaaaaaataatcacaacttctggaaatgaaagacacacttagagaaatacaaaatgcctggaaagtttcaacaatagactagaacaagtagaagaaagaacttcagagctcaaagacaagacttttgaattaacccaatcagacggagacaaagaaaaaagaaggaaaaaaaaagaacaaagcctccaaaatatttgggattatcttaaatgaccaaacctaagaataattggtattcctggagaagaaaataaatctagaagtttggaaaacttatttgagggaataattgaggaaaacttccctggccctgctagcaatctagacatccaaacacaaaaagctcaaagaacacctgggaaattcattgcagaaagatcatcacctaggcatatattcatcagactatctaaagtcaagacagacaaaacgatcttaagagctgtcagacaaaagcatcaggtggactacagaggaaaacctatcagattaacagaagacttctcagcagaaaccttacaaagccagaaagaattgaggtcccacatttagcctcctgagacaaaataattgtcaaccaagaattttgtatccagcaaaactaagcttcatgaatgaagatgagataaagccttcttcagacaaacaaatgctgagagaatttgccactactaagccagcactacaagaaatcccaaaaggagttctaaatcttgaagaaaaagaacctcaaaatacaccaaaacagaacttccttaaagcataaatttcacaggatctaaaaagcaataacacaacagaaaaaaaaaaggttttaaggcaacaattaacgtgatgaatagaacagtacataacatctcaatactaatgttgaaggtaaatggcctaaatgttccacttaaaaggtatggaatagcaaatagcagaatcgataaaaatccaccaatcaagtacctgctgtcttcaagagactcacccaacacataaggactcacataaccgaaaggtaaaggggtaaaaaaggatattccatgcaaatgaaaaccaaaagtgagcaagagtagctacttttataccagacaaaataggctttaaagcaacaacagtataaaaagacaaagagggacattatataatgataaaaaatagtccaacaggaaaatatcacaagcctaaatacatatgcacctaacactagagctcccaaatttataaaacaattactactaaacctaagaaatgagacagacagcaacacactaatagtgggggacttcaatactccactgacagcagtagaccggtcatcaacacagaaaatcaacaaataatggacttaaactatatcctagaacaaatggacttcatagatatttacagaacattcaatccaacaacttcaggatacacattcttttcttcagcacatgaacattctccaagatagaccaaatgacaggtcacaaaagtctcagtaaatttaagaaaatcaaaattatatcaactatcatctcagatcacagtggaataaaactggaaattaactccaaaaggaaccctcaaaaccacccaaacacatggatattaaataatctgctcttgaataatctttgggccaacaatgaaatcaaaataccaatttaaaaatctttgagctgaatggtaatagtgacataacataaaaaagcctctggtatacagcaaaagcagtgctaagagaaaagttcatagtattaaatgcctacatcaaaaagtctgaaagagcacaagtagataatctaaggccacacctcaaggaactagagaaacaaggacaaaccaaaccccaacccagaagaaaagaaataaccaagatcagagcagaactaaatgaaattgaaacagaaaaaaaaaatacaaaagataaatgaaacaaaaagccggttctttgaaaagataaataaaattgatagaccattagcaagattaaccaagaaaagaagagagaagatccaaattagctcaattagaaatgaaacaagagatattacaaccaatatcaaagaaatgcaaaagatcattcaaggctactatgaacaccttatgcatacaaaccagaaaatttagaagagatggataaattcctggaaatatacaaccctcctagattaaatcatgaagaaatagaaactgaacaaaccaataacagcgagattaaaagagtaatttttaaaactgcctacaaaaagaaagtccaggaccaaatgaattcacagataaattctatcagactttcaaagaaaaatcagtaccaaccttaccgaaactattcccaaaaaaatacagaaagaggggatcttccctaaagatcattctatgaagccattatcaccctaattccaaaaccaggaaaaaacaaaacaaaaaaagaaagctacagactgatatccttgatgaacatagatgcaaaaatcctcaacaaaatattagctaactgaatccaacagcatatcaaaaagataatacaccatgatcaactgggtttgataacaggaatgtagagatgttttgacagatgcaagtcaataaatgtgatataccacataagcagaactaaaacaaaaatcatgtgatcatctcaatagatgtagaaaaagcatttgacaaaatccagcatccctttatgattacaaccctcagcaaaattggcatagaagggacttacctcaaagtaataaaagccatctattacaaacccacagccaacattatactgaacagggaaaaattgaaagcattccccctgagaactggaacaagacaaggatgcccactctcaccacttcgattcaacatagtactggaagtcctagccagagcaatcagacaagagaaagaaataaagggcatccaaattggtaaagaggaagtcacactgtcactgttcacagattatatgatcatatacctagaaaatcccaaagactcatccagaaagctcatagatctgataagtaaagcttcagaatacaaaatttatgtacacaaatcattagcactgctatataccaacaattactaagctgagaaacaaatcaagaattcaatcccttttacaacagctgcaaaaaaatatatgcctaaaaatatacctaaccaaggaggtgaaagatctctacaagaaaactacaaaacactgctgaaagaaattatcaatgacataaacaatggaaacacattccatgctcacggatggatagaatcaatactgtgaaaatgaccatacagccaaaagcaagctacagattcaatgcaattagcatcaaagtaccatcattattcttcacagaactaggaaaaacactcttaaaattcatgtagaacctaaaaagaccttgcatagccaaagtaatactaagcaaaaagaacaaatatggaagtatcactttaactgacttcaaactatactacaaggctacagttactaaaacagcatggtactggtataaaaataggtacatagaccaatgaaacaaaatagagaacccagaaataaagccaagtacttaacagacaactgatctttgacaaagcaaacaaaaacataaagtgagcaaaggacaccttatttaacaaatagtgctgggataattggtaagccacatgtagaggaatgaaactggatcctcatcactcaccttatacaaaaatcaaccccaggtggatcaaagacttaaatctaagacctgaaaccctaaaaattctagaagataacattggtaaaactcttctagacattgacttatgcaaagagttcatgaccaagaacccaaaagcaaatgcaacaaaaacaaaaataaatagatgggacctaattaaactaaaaagcttcactgcagcaaaagaaataaccagcagagtcaatagacaacccacagaataggagaagatattcacaaactatgcatccaacaaaggactgatatccagaatctacaaagaactcaaacaaatcagcaagaaagaaacaaataaccacatcaaaaactgggctaaggatgtgaatagacaattctcaaaagaagatacacaaatggccaaaaaacatatgaaaaaaatgctcaatatcactaattatcagggaaatacaaattaaaacctcaatgagctaccaccttactcctgcaagaatgaccataattttaaaaactcaaaaaataatagatgttggcatggatgcagtgaaaagggaacacttacacactgctggtgggaatgtaaactagtacaaccactatggaaaacagtatggagattccttaaagaactaaaagtagatctactatttgatccagcaatcccactattgggtatctacccagaggaaaagaagtcattatatgaaaaagacacttgcgagcacatttatagcagcataatttgctattgtaaaaatatgaaaccagcccaaacacccatcagccaacaagtagataaagaaaatgcaaatgtggtaaatatacaccatggaataacgacttagccaaaaaaggaatgaaatgatggcattcacagcaaactggactgagttggagaccattattctaaataaagtaactcaggaatggaaaaccaaacatcgtatgttttcactcataagtgggaaataagctatgaggatacaaaggcataagaattatacaatggactttggggactaggggaagcgggtaggagggtgagggatgataaagcactacacattaggtacagtgtacactgcttgggtgatgggtgcaccaaaatctcagaaattaccagtaagtaacttatccatgtaacaaaaaggcatgttccccaaaaattattgaaataaaaaataaaatgaaatgcaacttcttcaacttgctattgctgtctaaagttttacatttgatcttagccaaaagaccaagaagaatgcagagttttagagctttatattttaacataatataatatttatgtaatattacataaaatatttatataaaaacacaaaatatgaatttaacacaaaataatctgattttaagtcaaaatttattaaatttaccactatattttattaatgtttgttctaaccattttcttttgtatttcacaccttcactctgagttcatctttcttcttgctagagtatattactttttaaatagttttagagtctatagataataagtgattttgagtttgtatgtctcaaaagtgctacatattgtcatctctctttttttatttagagacaggctctcagtgtatcacccaggctgaagtgcaatggagtcatcttggctcaacatatcactgtaggcttgacctttcagtctcaagcaatcttcccacctgagcctcccaagtagctaggactacaggcacataccgccatgcttggctaattttgtgtgtgtgtgtttgtggtgacaaggactcacttgttgcccaggctggtctcaaactcctgggctcaaccaatacttctcccttgacctcccaaagtgctggaagccaccatgactagctttgtttttaaaagagagacagagttttgctatgttgcccaggctgggttcaaactcctggcctcaagcactcttcccatctcaacctcccaaatcactgggattatagacatgagccactgcactcagccctgtcatcactcttgactgatggcataaaactaagaataaaattctaggctgatatatatccataataattaaaaattaatttaagaaattttaggctaatacttgtatccttcagcatttaaaagttactgtttcattgtcttctagcatctattatcattgctaagaagccttctgctagtccaaaattaatcatattatgttcacctcattacttcattactcatattcttcagttttactatgatgaacctgttgagggacagttactatgagacaaatatttgatcaccagaccctgctgaaggggccttattcatatctgtccaaatcactgttccccttttctaataataaaccatctccctacacaggaatgataaccacaaagaggtgctccttaagtaaaggtaaaaggttgtaacctctggggatgggcaggaagagcagaggtggtcggagaaggaaaggaattttctatagaatataggaattgagtgaagggagaattcacccaaaacctcatggggacttgtctatttcttccaggcacattgacgctgggattctaggatgcagatggtagggattagatacaacttcctgagctggcagtgaaaggactgacgtttggttccctataacttggggaggggctggtaaaggtaagacacaagagaactaagtgcccatacttgatcccagctaaatcaatcttcctagcattccacccagaaaggattttgacaactttattaaatgaaactgggaagtgaagattaggctcagtggagccagattggaatccagacaacatggcttaaggaaaaagaggaaacacgaaaggtgacataaagggcaaaagaatgaaatggagcctgaagacatttacaggcaagattaacaaaaattgagcctgagttctgcaattcacagtcctaaaactattttttatttatcctgctcagtactcaaagtatacttttgatatggaataaatcttttctcaattctggaaaatttttagctatctttgtttagaatattgctttttcaaaattttcttcattctcttgttctgaaactcgtactagaaatatgttagcattgctgatctttcttacatgccccttcactggctctgtcatgttttttatctctaggttttagatgaaatcaatagtactagctggttaattcactcatcagttcctcgattatgcctagtaaagaacttttttctggccaggcgtggtggcatacacctacttgagagactgaggcaggaggatcacttgagcccaggagttcaaggctgcagtgagctatgatcacaccactgcactccaacttgggtgacagagtgagaccctgtctcattaaaaaaaaaaagaatttatcctattacttttttgtatttttccagaattctgaaatgccatattggcatccaggaaaatatattactcacctgtgacacaaagaaagaagtcttgcttttttttttgagaaggagtcttgctatgtcaccaggctggaatacagtgacgccatctcagttcactgcaacctccgactccctggttcagcaattctcctgcctcagccttcagagtagctgggattacaggcacatgccaccacgcccaattaatgtttgtatttttagtagagacagggtttcaccatgttggccaggatggtctcaatctcctgacctcatgatccgcccacctcggcctcccaaagtgctgggattacaggcatgagccaccgtgccaggccacattttaaaattagtacatgacgtaccaggagagtctttatggtccatgaatacatagtggaccacgctcacagaaacagtattttagcttaactccttggttaagctaactccttggttaagctaaaactcatcttaaacaatttttcagattttagacttttaatttagagagtttcacatactataatgttcatggcatatatataatctcaaaattttccactaattcatactttttatacttacagtttagaagagtctaaataaaattttactttaaaagccaatgaccataaattgcttttgttagtatatattttgtactatatatctgttttctggcacttcttaaataaaaaatttactatgtattgttacaaaactatgaaagaaaaaataatctattacattgtttttaaattagtagatttttttaaataaatgttttaggtttacagaaaattggtcagacgagaaagaaagttctcatatatctcactatcccggctcacagtttcccctattattaacatcttgcattaatgtgtatgtttgttacaactgatgaaccaatattgacatattattataaaccaaagtccatagtttacattagagtttactgtatgttctacatttctatgtgttttcacactgcttaatgtcatgtatccaccattacagtatcatacagaatcacttcactgccctaaaaatcctctgagctttgcctattcatttctccatccctcctaacccctagcaaccactgatcattttactgtctccatagttttgctttttccaaaatgccatatgttggaatcataaagtctttgcagaatggcttctttcactcagtaatatgcatttaagtttcctccatatatttttatggcttgatagctcatttatttttaacacaataatattccattatctggatgtgccacagtttatccatttacctgctgcaggatatcttgatttcttccaagtttcagcaattatgaataaagctgttattcatgtgcatgtgtttatatgaacataaatcttcaactcatttgggtacataaccagggatgcaattgctagatcatattgtaagagtatgtttagttttgtaagaaactgccaaactgttttccaaactggctgtaccattttgcattccaatgaacaatgaatgagagttcctgttgtgacacatcttcaccagcatctggcattgtcaaggttttgtgttgctgtttgttgaggtggcttgttttttacttttttgttttttagccatcctaataagtgtatagtggtatctcactgtggttttaatttgcactccctagtgacatatgatgttgagcatctattcatgtttctttgccatttcttctttagtgagatgtctattcagatcttttgcccattttttaattgggctgtttgttttcttactgctgtattctaagggttccttatatgaaggttctgcaacatgctatttttactcagtataatgtttctaagagtcatccatgttatagcacataattggagtttattcattttctctgctatactatattccattatttccctgatggattgtttccagtttttgttaatataaatacatatgaacatctcataaaaatcgctttgtgtatcaaaaagtattaaagataatgccgaacatttttccaatgtggctatacaatgtactttctcatcagcaatatagaagatttcccatttgttctcatcctctgcaatgctttatatggtcagagttgttcacttttggcaatctagtgggtataaagatctaactgtggttctacctggtatttccgtgattaccagtgagacagagcatctcttcttatggttatatgccacacatattttctcttttgtgaaacaccagttcatatcttttgcgtatttttcaattgtgtggtcatctatcttatagatttatatatcattgaatatgttctatactaatcctttgttggtgatatgtattaaaatatgttctcctggccaggtgcggtggctcacgcctgtaatcccagcactttgggaggccaaggcaggcagatcacgaggtcagaagatcgagaccatcctggctaacacgatgaaaccccgtctctactaaaaatacaaaaaattagccaggcgtggtggcgggcacctgtagtcccagctactagggaggctgaggcaagagaatggcgtgaacccgggaggcggagcttgcagtgagccgagatcaagccactgcactccagcctgggcaacagagagagactccgtctcaaaaaaaaaaaaatgttctcctgagtttggcttgactttcattttctttatgtcacattttaagaagtcttcaaaatgtaatacatatgaaagccctaaaattaatcctatttctaattggaaaaatgtttaaattgaaaactcattaagagtatataagtagttatccttttagctaacatgattgttttcacttccttttttaaaaaaagaagttctttatatgcttcagatacacatctttatcaaacacatattttacaaatattttctcccactttctggcttgtttttttcttaacaatgtcatctgcagaaaagtttttaatcttagtaaagttcagcttaacaattttcctctcatggactctgctttttggtgctgtatctaaaaaatcacggccagagccaaggtcacctagattttctttgataatatcatctaaaagttttacagttttgcattttacatttaagtctatgatccactatcagttaatttttgtggaaagtataaggtcggtatctaaattcatttttttgcaggtagataccaagttatcaagttccagcagcattttttgaaaagactgtctctttattgaattgcctttgcaccttttgccaaagattagttgattgtatttgtgtagttctatttattagctctctatcctgtttcattgatttatttgtctcttcttttgccaacaccatactgtattggttacggtagtttatgaagccaggtagtgtcactctccaactctcttattctccttcaataatgtgttagctattctgggtttttccccttccatgtaaactttagaatcagtttcctgatagccacaaaataatggtgggcttttgactgggattgcattgactccatagatcaagttgggaagaagtgacatcttagtgctggccacatagcataagttaggaagtgttccttttgcttctattttctggaagagattgttgagaattagtatgatttttttcttttttcactggtagaatttaccagtgaaaccatctgggcctggtactttgtatttggaaagttattattgactcaatttcttttatatacgggggcctattcagattatctattgctccttgtgtgagttttagtagattagatcttccaaggaattggtctatttcatatgttatcaaatttgtgggcactgagtgtttataattacctttattttccttttaatgttcatggaatcagtatagttggtcccactttcatttttttatgttagtaatgtgtgtcttcttttttctttggttagactatctggaggcttatcaattttattaatcttttcaaagagccaactttggtttcattgattttctctacggttttcctattttcaatgtcattgatttctgctcttttgttatttcttttcttctgtttgttttaggtttatattgttcttctttctcagtttcctaaggtggaaattcagataatttatttagagctttcttttttaatatatgcatttaatgctataaattgttttcactgcatcccacaaattttgataagttgcatttttattttaatttacctcaaaatatttttaatttctcttgagactgattctttgacccatgtgttatttataagtatgttgtttcatctccaaacattttggaatttttccactatctgttatttatttctagtttaattttactgtggtctgagagcatgtttcgtaaggtttctatttttctaaatttgttggttttgatgcccagaatgtgatctatctaggtgaatgctctatgtgagcttgagaagaatgcatactttgctagtattgaatgaagtattctctaaatatctgctttgatctcaatgttgtgtttccccaaaattcatatgttgaaatactaacccacaaggtgatggtactagaggtggggctctttaggagatgaaggttataaaggcagagctcttatagatgggattagtacccttataaaagagatcccagacagccgccttgcccttccaccatgatgacacatagagaaggtgccatgtatgaggaatgggccctcaacagatgccaaatatgctagtgccttgatcctggacttctctgtcccccagaattgcgagaaataaatgtttgttgtttaaaagtcacccagtttttggtatttttgttacagcagctcaaaagactaagacaatgtcaattagatctagttagctgagagtgctattcagttcaactatacccttgctaattttctaactgctgaacctgtcttttactgataaatgtgtgttaaagattccaacaataatagtggatttgtttatttctccttgtagttctatcagtttttacctaatgcaatttgacactttgttattaggcacataaatattaaggatacttatgtcttcttacagactgacccagttatcatgtcatgttcttctttattcctgatagtttttcttgttctgaagtctgctttgtctgaagataaagtgtgctaccacagcttcttttgatttgtgttagtacggtatatctttatctccttacttttaatttttctgtgtcttaatatttaaattgggctttttgtaaacaaaatataattgggtcatttttctacccactctgtcagtctcttgatgtatttacaacaatcacatttaaagtgattattgatgtatttggattaacatctaccatatttgtaaccattttctatgtgctgcacctgttttttcttttaaaaaaaatcttaccctcttttctgccttccctggtcttttttttcttttcttttttgagacaaggtcctgctctgtcacgaaggctgaagtacagtggcgggggcatagctcatcacagcctcaaactcctagactcaagcaatcctcccatctcagtctccaatgcagttaggactacaggcacaagtcactaagtgcagctaattttttttactttgtgtagagatggaggtcttactatgttgctcagactggtcttgaactcctagctgcaaatgatcctcccaccttggcctcccaaagggctgggagactctagggattacaggctctagtcctaattgagcattttatatgattatactctctcctcgttttccatgctgcttcaaattcagatatccttatagcagattattcccaatttctctcttctgtcccctgtaacagtgctgtcattcatttcacttatctataagctatattcaccaaatacattgttgctattacgttaaatgaatagttatctattaaatcatctaaaaataagaaaaataaaaggttttatttttttacctccattcattctttctgtaacactctttctttctctatgtagatctgagtttctgacctatacccttttcttgctctccaaataacttttgaaatttcttgcaaagcagatagactagcaacaaattccctcagtttttgcttgtctgagaaagtcattatcttgccctcactttgaaggataattttgccggataaagaattctaagttggtagagttttttctttcaaaatgtaaactatttctctccactgtctgcttgtttgtgaaaagaattcaatgtaattcttaaccttattcctctgtaaataaggtggattttttcctctggtttctttcaaaacattctatttttctttggtattctgcagtttgaatatccctcatagaaacagatacaaatatccttaacaaaacattggcaaatcaaatccaacaatataatatttttaaaaaggataataaataatgacaaagtaagaattcaagattggtttaacattcaaaaatcaatgataccatattagcagaacaaaggagaaaaatatataattttaataaatgcaaaaaaaagcattggacaaaattcaaaagaaattaattttaaaaaactttttttcttttcagacagggtctcactctgtcacccaggtggttgtgcagtggcataatcatggttcactgcagcctcaacctcctgggttcaagtgatcctctcacctcagcctcctgagtagatctgactaaaggcacttgccatcacgcctggcttttttgggggaggcgggggagatagtgtctcctatgtttcccaggctgcttgtgaattcctgtcctcaagcaattctcccaccttggcccccaaagttttgggattatacgtgtaagccaccatacccatcctaaaaaaaagtattaacaaaacaaaaatatccattcccaagggtctcagttaaaaaaaaaaagaaagaaaaaggacaaaccaaaaatagaaggaaatctcctcaatcttataaaaggtatgtatggcaggggaagttataattaacattcataatagtcaaatattgaaaaaagatcaggaaaaaggcagtgaatgctcaggctcaccaattctattcaatgtagcactgaaggtcttagccattacaatatggcaagaatagaaaataaaaggaaaaaatatacattttttaaaaaagtaaaactatttcttttttaatatgtaaggctatatttttttttcttatttttgagacagggtgtcactttgtcaaccaacctggagtgcaatggtacaaacaaactcactgcaacatcaaactcctgggctcaagggatcctcctgcttcagccccccaagtggctgggactacaggtgcatgacaccatactcagctaatttttgcattttttgcagatacggggtatcaccatgttccccaggctggtctcaaatgcctgagctaaagaaatccacccacctcagccctgctgggattacaggcatgagccaccatgcccagcctatttttaaaaagtctaagaaatctaccaatcatgagaattaaaaagtgaatttagcaagatcacaagatacaaggttaatatttgaaaactaaaggatttgtatatattagcagcaaacaattagaaaaagaagttaataccaactattcttgttcaattaattcgaggtatgttttcataatttctaatcctttttgttataccttctttgatcattttcgacatcataaacatacttactttaaagcctttaacaaattcttacaaaatcattttaatatgcagcacatttatatttcaattattgatttttattgacttaagatcaatatagagtcagtagatggagcaaaatgggtgaatagaagactccactggccaggtgtgatgactcatgccttttaggaggccagggcaggagtagcacttgagcctaagagttcaagacaagcctgggcaacatagcaagacctcatctctaaaaacaaaacaaaacaaaaacaaacaaacaaacaaaaaacaaaggaagcctccactcttcatcctccccacaggaacaccaaattgaacaactatccacatgcaaaaaaagcacattcataagaaccaaaaatcagataagcaatcacagtacctaattttaacttcatatcactgaaaaagtcactgaagagggtggaaaagccagtcttgaattgttgatgccacccctaccccatcccctggcacaggccacaaggagtggagaaagaatctgtacacttgggggagagacagcacagtgattgtggaacttagcattggaactcagtgctgccctgtcacagcagaaagcaacaccaggaagatctcagctggtgcctgtggagggagcatttagaccagaactagccagaagagaattacccatcccagcagtcagaatctgagttctggcaagccttaccactgcaggctaatgtcctctagggtcctaaataaacttgaaaggcagtctaggccacaaagactattattcctgggcatgtcctggtgctgtactggactcggagccagtggactcggcggggcacatgacctagcaaaccaccagccagggaagccaagggagtgcttgtgccacccctgcctcaaccacaggcagtgcagcccacaggtccaggaaagactacttccttctgcttgaggaaaagagagcaaagggtaaagagtactttgtcttgcaacttggataccagctcagtcacagtaggatagggcagcagagagagtcctgaggcccccattccaggccctagctcttggatgacatttctagacacaccttgggccagaagggaacctcataccttgaaggtaaggacccagtcttggcaggattcatcatctgctgactaaagagcccttgggcctgaataatcagcaggggtaaccagacagtatttgccatgggccttgggtaaaactgggagacttgctggcttcaagtgtgacacagcaaattcccagctgtggtgaatatggggagagactccttctgcttgagaaaaggagaaagaacggtaaaggggactttgtcttgcagcttcaataccagtgggatagagcaacaagcaggctctttaggtccccagttcccagcctttgttcttcagtggtatttctggacctgctcagggccaaaggggagcccactgacctaaagagagagtcccaggcctggtagcattcaccacaagctgactgaagagaccttgggccttgaatgaacatttgtggtagcaaggcaatatgtgccacagggcagaggtgccatggggaaaaactcctctgcttgtggactaaggggggaaaacagtgggaaggactttgtcttgtggcttgggtgccagttcagccatagtagagtacagcaccaggtagattcctaaggtttctgacttcaggccttggctcctggacagcatctctagacctgcccaggactggggggatcttgttaccctgaagggaaggacacaagcctggctggcttcacctcctgcttattgcagaggcctagagcattcagtaaacataggcaataggcaggcagtggttgctgcaggccttggacaagacccagggctgtgctagctttaggtttgacccagtgcagtcgcagtggtggtggccacaggggtgcttgtgtgacccctgccccaaatccaagcagctcatcacagagagactgtttgtttgggagaaaataaggaaaaagaacaagtgtctctgcctggtaatccagggaattcttctagatcttatctaagaccaccaagttggcacatctgtaagtctgcaagagccacagtattacttggctgaacattactgctacctaatgcagatacagatgcagtgaccaaaaactgaaatcatagcacccaagtcccttcaaatacctgcaaatcctccccacaatggacagatacaaacaagcccagactacaaagactacaatgaatacttaactcctcagtgcccagataccaacaaacatccacaagcatcaacaccgtcaggaaaacatgatcaaaaacatgacttcaccaaacaaactaaataaggcaccaatgacaaatcctggagagagaaagatatgtgacccttcagaaagaaaattcaagatagctgtttgaggaaactcaataaaattcaagataacacagagaagaaattcagaatcctatcagatgaatttaacaaaagattgaaataatttaaaagaatcaaatggaaattctggagttgaaaaatgcaaatgacatactgaataatgcatcagagtctcttaacagcaaaattgatcaaggagaagaaagaattagtgagcttgaagacaggctatttgaaaatatatagtcggctgggtgtgatggctcatgtctgtaatcccagctctttggaaggccaaggcaggcagatcacttgagattaggagtttgaaaacagcctggcaaatatggcaaaacccgtctctactaaaaacacaaaaattagctaggcaggtgcctataatcccagctattcaggaggctgaggcaggagaatcacttgaacctaggaacacaggttgcagtgaaccgagatcgtgccactgcacaccaacctggatgacagagtgggacaccatctcaaaaaaaaaagaaaatatagagtcaaaggagacaaaagaataaaaaataagcatgcctatgagatctagaaaatagtcttaaaagggcaaatctaagaaatattggccttaaagagaaagtagagggagagacagaaagtttattcaaaatataataacacctgggcatggtggctcatgcctataatcccagcacattgggaagccaagtccagaagttcaagaccagtttggataacatggcaaaatcccatctctaccaaaaaattaaaaaaaaaaaaaagttagccaggcatagtggtgcacacctgtcccagctgagtagtcccagctactcaggaggctgaggtagaaggatggtttgatcccaaaagatgaagtttgcagtgaaccgagatcacaccactgctttccagcctgggcaacagccagaccctgtctcaataagaaaacaaaacaaaacaggataataacagggaaattctcaaacctagaaaaatatatcaatattgaaatacaaaaaggttatagaacaccaagcagatataacccaaagaagactacatcaagatatttaataagcaaactccctcagatcaaggatgaaggttaaaaatacagtcctaagatcaacaagagacaagaaacaagtaatatacaaaggagctccaatatgtctagcagcagacttttcagtggaaatcttacaacccaggagagagtggcatgaattatttaaagtgctgaaggaaaaaaaaaaaaaaacttttatcctagaatagtgtatccagtgaaaatatccttcaaacatggggaaataaagactttctcagacaaaaggtgaggtatttcatcaacatgagacctatcctacaaaaaatgctaaggggagttcttcaatctgaaagaaaaggatgttaaatgaacaagaaaaaatcatcttaaggtacaaaagtcactggtaatagtatgtacatagaaagatgcagattattataacactgtaaatgtggtgcataaactacacaaatcttcagtagaaagactaaaagatgaacccaccaaaagtaataactacaacaaattttcaaaaaatagtataataaaatataaatagaaacaacaaaaagttaaaaagcagggggatgaagttaaagtgtaatgcttttattcattttctctttgcttgtttgtttgcttgcttgtttatgcaatcagtgtcaagttatcagtttaaaataataagttataagatagtatttgcaagcctcatggtaacaccaaaaaacatacaacagaccagcgtggtggctcacgtctgtaatcccagaactttgggaggtcaaggcagtggatcacttgaggtcaggacttcaagaccagccaggccaacatggggaaaccccgtctccactaaaaaatacaaaaattagccagcatgggggtgcatgcctgtagtcccaactactccagaggctgaggcaggagaattgcttgaacatgggaggcagaggctgcagtgagccaagatcatgccactgcactccagtctgggtgacacagggagactccatcaaaaaaaatcaatcaatcaataaataaacagatacacaaaaaataaaaagcaagaaattaaaaattatcatctgagaaaatcaccttcactaaaaaggaaggcaggaagaaaggacagaaggaagagaagaccataaaccaaccagaaaacaaataacaaaatatcaggagtaggcccttacttatcaataataatactgaatgtacataaactaaactttccagtcaaagacacagaacagatgaatggattaaacaaataagacccaacaatctgttgcctacagtaaacacactttacctataaaaacacacatagactgaaaatcaaaaaatggaaaaagtcattccatgccaatagaaactaaaaagtgcaggagtagctacacttagacgaaatagatttcaagacaaaaagtataaaaagaaataaagaaggtcattatatgataaaggggtcaacgaggataaacaattataaatatatatgcaccaaacactggagcacccagatatataaagcaaatattactagcatgaagaagagaaatagaccccaatacaatattagctggagactttaacaccatgctttcagcactgaacaaattattcagacacaaaataaacaaagaaacactgtacttaatctgcactatagagcaaatggaccaaatagatatttacagaatatttcatctaatggttgcagaaaaatcattctcctcagcacatggatcattctcaaggatagaccatatatatgttaggccacaaaacaagtctttaaaaattgaaaaaaaattgaagttatatcaagtatcttctctgaccataatggaataaaaggaaatcaataacaagaggaatcttggaaacaataaaaatacatggaaattatccaatatgctcctgaatgacaggggttcaatgaagaaattaaaaagaaaattaaaacttttcaaacaaggcaggacaacagcccatcctagagcaacatggagccaagggaacctcccccacccagggaagtggtactggaaaatccaagacaactagggactgcagcacacccccagcatactgcagcagccctacagaaaagtggctggagtgtcacatgggtgcctgttcccatatctcctcactgggcaggttctccaggccctgggcctccagccatacccggctggggctattgagccaggggcatctctgcaattccctggacagaactcccagtgggaggggtgggttgccatctttgctttcttacagcccttgcccttgctgtctccaggcttgggagagtctgtggaaatcaggggctcatcccaacccccagcacagagcaaccacctcacagaaaagtggccagactgttctccatgcagatcccagtcctcacttctccttacttgacagagccacacaacctggaactctgacacaaccaccctgcccccacctgatcaccacaatcagagacagcccagcacttctctgaggagaaaatcccagagtcaacctgcaactgctctgccactacagttgcagtcatacaacctaacaaccctcaaactaggaaggaacaaagggctgagtcattatgctggcatccccagcataccacagctaccacagggtgaggagtccagcccccttccctgggaatccctacccccgcccttcaccaggcaaggcccccaactcatggacacaaagcagctgccacacccatggctgagcatacctacttgtagtgcctggagtttccctggggagaggatcccagaagcacaaaacagcccctctgccactgacacagtaacagttctatccctgatgccttggtctggggaagaaacaaacagattgagggttatgcccaagcttacagtgcaccatacacaccatatggagaagagaccaatctctcctccctgcgagccttcaaccccctcctccccaataagcagacctccaagctcataccagcagtacagccaccccaccccactggctgaacacccccagtaacagtgactccatgtttcttggaggggtagcccccaagagcaactgaaatcctctctgccactgcctctgcagtgaaactgcccttgctacacttgggcttaacgaaggagcaaagaccctaagtgctttattcacacctccaacaaactgcagttagtccaaggagaggaggccagtctatctcccacagatcacacccacaccccctcttgtcaccagacagggaacccccaacttgggcccacagcacagacttcatactgcactgtttgcagagcagttgctgacctgcatttctctggggtgaagccctccgaagacaaacaaaagacccttggccacaaccactactgaggtcccttcctcggctgcctccaagttggggaagaaacataagccctgagatcatgccagagctgcagtgggcagcccaggagtgcaaagccatgaactacagccatcactcaatgggaagaggagtccccatcactcaatgagagggatcacggctgcaactgtgaggaaatataggaaagtcacatgactaagcaagagcctaccaactgaccaatacatctaagtgtcacctactaaatcatatcccaaatcttcaacaccaaaagcacctcactaacataccccactatgaaacaaaagacaaaaagtaagctacagataaagatcctgcacaaagcctcagccctgtgaaaacatccagaaaagaagtgtattgactatactcaatctgcactgcagttaaagaaatagccacatgcagagatgaggaagaaccaagacaataattctggtaactcaaatggcaagagtgtcatatgacctccaaatgaccacaccagttctccaacaaaagttcttaaccaggctgagctggctgaaatggcagaaatagaattcagaatatggataggaatgaaggtcattgagattcaggggactggcaaaacccaatccaagaaaacaagaattgcaataaagtgatacaggagctgaaggatgaaatagccagtacaggaaagaacctaaaagatctgacagtgctgaaaaacacaatacaattatttcacaatacgattataagtattaacagcagaatagaccaaactgaggaaagaatctcagaactggaagactgactctctgaaataggacaggcagaaaaaaataaagaaaagaaaatgaaaaaaaatgaacagaagccccaagaaatatggagtcacgtaaagaggccaaatctactaatcgttggcatccctgaaagggaggaggagaaagcaaacaacttggaaaacatatttcaggatatcatccatgaaaactcccccaacctggctagagaggccaacagtcagatgtaggaaatacagagaactcctgaaagattctacacaagaatatcatcctcaagacacacagccatcagattttccaaggttgaaatgaaacaaagaatgttatggcagctaaagagaaagggcaggtcacctacaaaggaaacaccctcaagataacaccagatgtttcagctgaaaccctatgagccagaagagattgggggcctacagtcaacattcttaaagaaaaaatcttcgaccaagaattttatatctagccgaactaagcttcctaagtgaaggagaaataagatccttttcagataagcaaatgttgagggagtttgttaccatcagaccggccttacaagagatcttgaaaagagcactaaatatagaaaggaaagaatgttaccacctaatacaaaaacacacttaaatacacagaccagtgacactataaagcaaccacacaaacaagctggcatgataaccagctaacaacacaatgacaggatcaaacccacacatatcaatactaacctaaaatgcaaattggctaaacgccccatttaaaaggcccagagtggaaagctggataaaaacacaaaactgtattagtccattttcatgttgctgataaagacatacctgagactgggcaatttacaaaacaaacagatttaattggactcacagttctatgtggctggggaggcctcacaatcatgatggaaggcaaggaggagcaagtaacatcttacatggatggcagtaggcaaaaagagaaactgtgcagggaaactccagtttttaaaactgtcatatctcatgagactaagtcactatcagcacacaaaagacccgcccccataattcaaccacctcccaccaggttcctcccatgacacatgggaattgtgagagttacaattcaagatgagatttgggtgggataacagccaaataatatcaaagacccagtggttgctgctgctgccttcaagagacccatctcacatgtaatgaccctcacaggctcaaagctcaaaataaagggatggaagaaaatctacaaagcaaatggaaatcagaaaaaagcaggggttgcaatcctaatttcaaacagaatagattttaaaccaacaaatatcaaaaaagacaaagaagggaattacataatgataaagtgttcaattcaacaagaagatctaactatcctaaatatatacacagcaggcggaggttgcagttagctgagatcatgccactgcactccagcttgagcgacagagcaagactctgcctcaaaaacaaaaacaaaaacaaaacaatggaatacagtgaaagtgaaagcagtactaagagggaagtttatagctataagcacctacattttaaaaagagaaaaacttcaaataacctaacaatgtgtcttaaagaattagaaaagcaagacaaaaccaagcccaaaattagtagaataataaaggtcaaagcagaaataaatgaaattgaaatgaagaaaagaatacaaaagaacaatgaaacaaaacgttgtctttttgaaaatataaacaaaattgacaaatctttagccagactaagaaaaaaagagaaaaaactcaaataaatgaaatcagagatgaaaaaagagacattactactgatatcagagaaattcaaaagataattagaggctaccatgaccaagtatatgtatgccaataaattgaaacaccaaaagaaataaataaattcctagacacataaaacctatcaagattgagccatgaagaaatctcgaacagactaataacaagtaatgggctcaaagcaataataaagtatccaagtaaaggaaagcccagaacctgatggcttcactgctgaattttaccaaacatttaaagaactaatatcaatcctactcaaactattctaaaaaaaaccaaaagtagaggaaagagggaatacttccaaactcattatatgaggccagtatcaccctgataccaaaaccaggcaaagatatatcaaaaaaataaaactacagtccaagatccctgatgaacactgatgcaagaatcctcaacaaaatactggcaaaccaaattcaacaacacattaaaaatatcattcatcggctgggcgtggtggctcatgcctgtaatcccagcactttgggaggccgaggcaggcggatcacaaggtcaggagatcaagaccatcctggctaacatggtgaaaccccgtctctactaaaaaatacaaaaaattagccgggcctggtggcgggcgcctgtagtcccagctactcggaaggctgaggcaggaaaatggtgtgaacccaggaggtggagcttgcagtgagtcgagatcgtgccactgcactccagcctgggcgacagagtgagactccatctcaaaaaaaaaaaaaaaaaaaatcattcatcatgatcaagtgggatttaccacgaggatgcaaggatctctcaacatactcaaatcagtcaatagaatgaaggacaaaaaccatatgattatttcaagtaatgccgaaaaagcatttgataagattcaacatcccttcaggctgaaacctctcaaaaaactgggtatggtaggaacatatctcaacataataaaactcatatttgcaagacccacagctaatatcatactgactggggaaaaactgaaagccttttatctttaatctgaaacatgacaaggatgcccactttcaccacagtaattcaacgtagtactgaagtcctagctagggcaatcagacaagagaaagaaataaagggcagccaaggctgggcatggtagctcacacatgtaatcccagcactttgggaagccaaggcaggcagatcacctgaggccagggcagccaaggctgggcatggtagctcacacatgtaatcccagcactttgggaagccaaggcaggcagatcacctgaggccaggagttcaagaccagcctggccaacaaagcgaaaccctatgtctactaaaaatacaaaaattagccaggcgtggtggtacacacctgtagtcccggctactcaggaggctgaggcaggagaactgcttgaacctaggaggcagaggaaggttgcagtgagctgagatcacacaccactgcactccagcctgggtgacagggtgagactctgtctaaataaataaataaatagcatccaaattggaaacgactaactcaaattatccttgtctgctgacatatttaaaaaacctgaagtctccacaaaaaactactagaattcatcagcaaattcaataaagtggcaagatacaaaatcaacatacaaaaatcagtagcatttctatatgccaacagtgaacaatctgaaaaagaaacaaaaaatataatcccatttacagtaatcacacataaagttcaatacctaggaattattgtagctctctgcaacattgaactccttggttcaaatgatcctcctgcttcagcctcccatgtagctgggactacaggcatgtgccaccacatccagctatttttttaaattatatttagggatgggatctcattatgttgcccaggctgatctcaaactcctggcctcaagtgatcctcccatctcagcctcctgagtagctaaaaatacagtcatgagccaccacatccagccatagatatacaattattggtttatgctattatcttttaaaagtttagaaaaaagagaagagttacaaaccaaaaataggtagttctttgatgagtgatttttttatgtctttgtctgggttcaagttattgtctaatgtcccttcatttcagcttgaagaagtccctttgtcattttttgtaggtaaggtctactagagataaactcagtttttgtcagtctaagaatgtcttaaattctccttcatattggaaagatagtttggccagatacaaaattcttgtggattattcaattactttgaagatgtcatcccattgctctctggcttccatgatttctgatgaaaaattagctgttaacttattgaggctctcttgtacataagtcacttcactgttgctacttttaagattatttttgcttttaatagtttaattataacttatcttggtgtggctctctgttatcttacatggagtttgttgagcttctttgatgtatagctttatgtcttttgtcaaatttcgaaagttttaaaccattatttccttaagcattctttctgtccctttctctcctctcttctgggactccaactatgcataacagtcccacaggtttctgaggctctgctcattttcattcattcattttcctgatcttcagcataatctcaactgacctattttcagtttcatgaattctttcttttgcctgctcaaatgtgatttgcacacttcttgtgaatttctcatttcagttattatgcttctcaacaccataatttctctttggttcctttttataacttctacatctttgctgatattcactatttggtgagacatcagtctcatggtttccttatttgcaaattgtttcctttagctgtttgagaatatttaaaataattgatataaaatctttgtctagtgaatccaatgtctgagcttcctcaggaatagtttctattaatttccttttctcctgtccatgggccatatgttctcatttctttatacttgttgaatatctgatactttgacaagtataatgtgaaatctctggaaatcagaatcttcaaccttctctggggttttttgttgcttcttgttgtagttgttttgtttagttagtgacttttctaaacaaattttgtaaagtctgtattcttcgtcacatgtagctactgaattctgtcccatgaacttagtagtcatctaatagttcaacagagatttccttaaatgcctagaatcaacacaaatcaaacaacaacaacaacaacaaaaacctcccagtctttgtaaatgggcttcgtatatgttgagcatgccttcaacatacagtttacaacttccttagtcctcaattcctgcttacacagatcctaaaagtcattccgagaagaaaacttgaggtctttctcaggtttttttttttagtatgcactcagtcctgggcatgcagttggccttctagattaccaggaatatgtgggtacttttcaaagcgtattccccaaaataactctttccccagcctttcttcctcagctttttggttactctattgtttgccccaactattatgcctttccccaggtggcagcaataaaaacatttgcttttaaatgtttccaaactatacctccagggtagccatctcatctgtgagaaagttctgagttaaacaaactaatggcaagccttttatgtaatacttcatggaagcaccagacaggtcaaagccacagttctttgggaataaggtccatgctgctcccacttgtactatgtacctgtagctggaatgtcagctgtctttaaaaccaccaccaagatgggaaatgaggaaaacctgagtaagttaaagtgttacaaagttattttacagagattcaaggttttatttaattattattaaatatttccctggttgctgtaagcttttgattagtttcaagttttaaaaaactcgatcttcaaattttttgccagtttttgtggagggatggactttgggacttctctactccaccatttttgtttatgttactcagcattaactgattatataaagttaaaacgattttacattcctcagaggaaagtccacttggtcgtgatgaattattctttctacatatttggatttgttagacttttctaaattttttaatttgtttttgtaaggagtattgatctgtgagtttgagtttcttccttataatgttgttgtatgtatggttttggtgtcagagtaatgctagcctcatctacccccatcataaattttctggaagagtttctgtctgattagtattatttctcctttaaatgtttggtagaatttgccagtgaagctatctggcactggaattttctttgagaagattttgacttacaaaaccaattgctttaatgaatatatagatactaaggttattcatttcttcttaagtaagctctggtagtgtcttttaagaaattgatttcaatttcatctaagctattgaatccataggcataaagttcttctattatccttttagtatctgtagaatattcatgtatttcttttatcttttttccttatcactctgactagatgtttatcaacattatcaatatcaaagaaccaattttgatttcactgattttttcttactgtttttctgttctctatttcattaattttcattttgatctttattgtttctttccacatggttagtttgggtttagtttgcttgtctttctctatttcataatgtggatctaaagtgatggatttgagagttttcttgttctctaatgcaggttttcagtcatataaacttccctatagggactaattgaacagcattcctcaagttttaacatgttatgttttcattttctttccatttaaattgaccttctaatttctttttaaaatctatttatttagaagtatattatttagctttcaaattgtgttaggctattcttgcattgccataaagaaatatctgaaaccggtaccacttcaagatagccaaataggaacagctccagtctgcagctcccagcaagatcaacacagaagatgggtgatttctgcattcccaactgaggtacctggttcatctcattgagactggttggacagtgggtacaacccaaggatggcaagctgaaacagggcaggacattgcctcatctaggaagtgcaaggggtcaggggatttccctttcctagctaagggaagccgtgacaaactgtacctggaggaacaatacacttctgcccaaatactgagcttttcccacgatcttagcaaccagcaaaccaggagatcccctcccatgcctggctcggtgggtcccacacccacagagccttgctcactgctagcacagcagtctgagattgacctgcgatgctgcagattggtggggggaggggcatccgccattgctgaggcttcagtaggcagttttatgctcacaaagcagccaggaagctcgaactgggtggaggccaccagagctcagcaaggcccactgcctctctagattccacctctgtgggaaaggcatagctgaacaaaaggcagacagcctctttagacttaaatgtccctgtatgacagctctgaagagagcagtggttctcccagcgtggcattcgagctctgagagtggacggactgcctcctcaagtgggtccctgacccctgtgtagcctgactgggagacatctcccagtacgggccaacagacacctcatacaggtgggtgcccctctgggatgaagcttccagaggaaggatcaggcagcaatatttgctgttatggagcctctgctggtgatacccaggcaaacagggtctgaagtggacctccagcaaactccaacagaccttcagctgatgggcctgactgttagaaggaaaactaacgaacagaaaggaatagcatcaacatcaataaaatgacatccacaccaaaaccccactgtaggtcaccaacatcaaagatcaaaggaagataaacccacaaaggtggggagaaaccagagcagaaaagctgaaaattccaaaaccagagtgcctcttctcctctaaaggactgcagctcttcaccagcaagggaacaaaactggacagaaaatgagtttgacaagttgacagaagtaggcttctagaaggttggtaataacaaacttctctgagcttaaggagcgtgttctaacccatcacaaggaagttaaaaatcttcaaagttagaggaatggctaactcaaacagtgtagagaagaccttaaatgacctgatggagctgaaaaccaaagcacaagaacttcgtgacacatgcacaagcttcgatagccaatttgatcaagtggaagaaaggatatcagtgattgaagatcaaattaatgaaataaagcatgaagacaagattagagaaaaaagaatgaaaacaaatgaacaaatcctccaagaaatatgggactatctgaaaagaccaaatctatgtctgattggtgtaactgaaagtgatggggagaatggaaccaagttagaaaacactcttcaggatattatccaggagaacttccccaacctagcaaggcaggccaacattcaaatgcaggaaatacagagaacaccacaaagatactccgtgagaagagcaccccaagacacataattttcagattcaccaaggttgaaatgaaggaaaaaatgttaagggcagccagagagaaaagtcgggttacccacaaagggaagcccatcagactaacagagatttctctgcagaaaccctacaagccagaagagagtgggggccaatattcaacattcttaaagaaaagaattttcaacccagaatttcatatccagccaaactaagctttatgagcaaaggggaaataaaatcctctacagacaagcaaatgctgagagattttgtaaccatcaggactgccttacaagagctcctgaaggaagcactaaacatggaaaggaacaaccagtaccagccactacaaaaagatgccaaattgtatagacaatagacgctatgaagaaacggcatcaattaatggccaaaataaccagctaacatcataatgacatgatcagattcacacatagcaatattaaccttaaatgtaaatgagctaaatgccccaaataaaagacacagactggcaaattggataaagagtcaagacccaccagtgtactgtattcaggagacccatctcatgtgcagagacacacataggatcaaaataaagggatggaagaagatctatcaagcaaatggaaaacaaaaaaacgcaggggctgcaatcctagtctctgataaaacagactttaaaccaacaaagatcaaaagagacaaagaaggccattacatcatggtaaagggatcaattcaacaagtagagctaactattctaaatatatatgcacccaaacaggagcacccagattcataaaaacaagtccatagagacctacaaacagacttagactcccacacaataatactgggagacttcaacaccccactgtcaatattagacagattaacaagacagaaggaaaacaaggatatccaggacttgaactcagctctggaccaagcagacctaatagacatctacaaaaccctccaccccaaatcaacagaatatacattcttctcagcaccacatcacacttattctaaaattgaccacgtaattggaagtaaaacacttcttagcaaatgtaaaagaacagtaatcacaacaaactgtctctcagaccacagtgcaatcaaatgagaactcaggattaagaaactcactcaaaactacacaactacatggaaactgaacaacgtgcttctgaatgactactgggtaaataacaaaatgaagacagaagtaaagatgttctttgaaacgaattagaacaaagacacaacataccagaatctccgggacacatttaaagcagtgtgtagagggaaatttatagcactaaatgcccacaagagaaagcaggaaagatctaaaattgataccctaacatcacaattaaaagacctagagaagcaagagcaaacaaattcaaaagctagcagaaggcaagaaataactaagatcagagaagaactgaaggagatagagacacaaaaaaacctttcaaaaaaatcaatgaatccaggagctggttttgtgaaaagatcaacaaaatagatagaccactagccagactaataaagaagaaaagagagaagaatcaaatagagacaataaaaaatgataaaggggatattgccactgatcccacagaaatacaaactaccatcagagaatgctataaacacctctatacaaataaactagaaaatctagaagaaatggataaattcctcgacacatacaccctgctaagactaaaccaggaagaagttgaatctccgaatagaccaataacaggttctgaaattgaggcaataattaatagcctaacaaccaaaacaagtccaggaccagacagattcacagctgaattctacctgaggtacaaagaggagctggtaccattccttttgaaactattccaatcaatagaaaaagagggaatgctccctaactcattttatgaggccagcatcatgctgataacaaagcctggtagagacacaacaaaaaaagaaaattttaggccaatatccctgatgaacattggtgtgaaaatcctcaataaaatactggcaggagaatggcatgaacccaggaggcggagcttgcagtgagctgagattgcaccactgcactctagcctgggcgacagaacaagactccgtctcaaaagaagtaaaaataaaaataaatactggcaaaccaaatccagcagcatatgaaaaagtttctccaccacgatcaagtcagcttcatccctgggatgcaaggctggttcaacatacgcaaatcaataaacataatccatcacataaacagaaccaatgacaaaaaccacatgattatctcaacagatgcagaagaagccttcaacaaaattcaacagcacttcatgctaaaaactctcaataaactaggtattgatggaacatatctcaaaataataagagctatttatgacaaacccacagccaacatcatactgaatgggcaaaaactggaagcattccctttcaaaactggcacaaaacaaggatgccctctcccatcactcctcttcagcatagtgttggaagttctggccagggcattcaggcaagagaaagaaataaagggtattcaattaggaaaagaggaagtcaaattgtctctgtttgcagatgacatggttgtatatttagaaaaccccatcatctccgcccaaaatctccttaagctgataagcaacttcagcaaagtctcaggatacaaaatcaatgtacaaaaatcacaagcattcctatacaccaataacagacagagagccaaaccatgagtgaactcccattcgcaattattacaaagagaataaaatacctaggaatccaacttacaagggatgtgaaggacctcttcaaggagaactacaaaccactgctcaacgaaatgaaagaggacacaaacaaatggaagaacattccatgctcatggataggaagaatcaatatcgtgaaaatggccatactgcccaagttaatttatagattcaatgctatccccatcaagctaccaatgactttcctcacagaattggaaaaaactattttaacattcacatggaaccaaaaaggagcccacatagccaagaaaatcctaagcaaaaagaacaatgctggaggcatcatgctacctgacttcaaactatactacaaggctatagtaaccaaaacagcatggtactggtaccaaaacagatatatagaccaatagaacagaacagaggcctcagaaataacaccacacatctacaaccatctgatctttgacaaacctgacaaaaacaagaaatggggaaaggatgccctatttaataaatggtgctgggaaaattggctaaccatatgtagaaagctgaaactggatcccttccttgcaccttatacaaaaattaactcaagatggattaaagacttaaatgttagacctaaaaccataaaaaccctagaagaaaacctaggcaataccattcaggacataggcatgggcaaagacttcatgactaaaacaccaaaagcaatggcaacaaaagccaaaattgacaaatgggatctaattaaactaaagagcttctgcacagcaaaagaaactatcatcggagtgagcaggcaacctacagaatgggagaaaatttttgcaatctacccatctgacaaagggctaatatcaagaatctacaaagaacttaaacaaatttacaagaaaaaaacaaacaactccatcaaaaagtgggcaaaagatatgaacagacacttctcaaaagaagacatttatgcagccaacagacatatgaaaaaaatgctcatcatcactggtcatcagagaaatgcaaatcaaaaccacaatgagataccatctcacaccagttagaatggtgatcattaaaaagtcaggaaacaacaaatgctggagaggatgtggagaaatagggaagcttttacactgtgggtgtaaattagttcaaccattgtggaagacagtgtagcgattcctcaaggatctagaactagaaataccatttgacccagtgatcccattactgggtatatacccaaaggattataaatcatgctactataaagacacatgcacaagtatgtatattatggcactaatcacaatagcaaagtattggaaccagcccaaatgtccatcaatgatagatggattaagaaattgtggcacatatacaccatggaatactatgcagccataaaaaaggatgagttcatgtcctttgtagggacatggatgaagctggaaaccatcattctcagcaaactatcacaaggacagaaaaccaaacactgcatgttctcactcataggtgggagctgaacaataagaacacatggacacagggcagagaacatcacataccagggcctattggcggggtggggggctgggggagggatagcattaggagaaattcctaatgtaaatgacaagttgatgggtgcagcaaaccaacatggcacatgtatacctatgtagcaaacctgcacgttctgcacatgtaccctagaacttaaagtataatttaaaaataaataaataaaataaaagtaaaggcctttctctttggaaaaaaaaagagaagaaatatctgaaactgtgtaatttataatgaaaagaggtttacttgtgtcacaattctgcaggctgcacagaaatcatggtgccagcatctgcttatcttctggggaggccccacgagcttttacttatggcaggtgaagcggtaccagacgtgtcacatggcgagaatgggagcaagaggtgcgtaaggtgccacacacttttaaacaaccagatctaatgagtactcactcactaccatgaggacagcaccaagccatgagggatctgcccccatgacccaaacacatcccaccaggccccaccttcaactttggggaatacaattcaaaatgggatttggtggtgacatatattcaaactatatcattccattcctggcccctcagagctcatgttcttctcacactgcaaaaaaataaaaataaattaaaaaaaatacaatcatggcttcccattagtcccccaaagtcttaactctccagcattaattcaaaagttcccagtcccaagtccaaatccaaagtctcatctaagacaaagcaagtactttctaaccatgagcctgtaaactaaaatacaagttatttactactaagatacaatgggagtattggcatagagtaaacatttctgttccaaaagggagaaactggccaaaagaaatgggttacaggccccatgaaagtttgaaaaaaccagcagagcattcattaaaccttaaagctccaaaataatttcctctgactccatgtcccacatccctggcacactagtgcaaaaggtgggctcccaaggccttggacagctccacccctgtggctttgcaggatgcagcccccacagctgctctcatgcactagagctaagtgcctgtggcttttctgggaacaaggtgcaagctgtcagtggatctgtcattcttgggtctgcagaatagtggcctcacagctccgctaggcaatgccccagtagggactctgtgttggggttctatccccacatttctcctctgtactgttgtaccctgcagtaggcttctgcctgggcacctaagctttctcatacattctctgaaatcttggtggaggctgccaagccttcgctcttgcactctgcgtgctgacaggcttaacaccatgtgaaaaccaccaaggcctacagctcacattctccaaggtggtaggtcgagctgcacctgggccccattgggccccagctagagctgcagcagccatgatgcggaaggttgtgtctcaaggctgcacagggcagtggggtcctgtgcctggcccataaaagcattcttgccttctagacctctgggtctgtgatggaaggggttgccacaaaggtctctgaaatgccttcaaggccttttcctaattgtcttggctattagcacatggttcccttttagttatgcaaatatctctagcaagtggttgaattcctcttcccaaaaaatctttttctttctttgccacatggctaggccacaaatattccaaatctttatgctctgcttcccttttcaatataaattccatctttaagtcattcctttgctcctgtatctgagagtaggccacatcttcaacacactgctgcttagaaatttcttctgccagatacccctatgtcatcactctcaagctcaaacttccacagatctctagggcatggacacaatacacaatacagccaagttctttgataaggtatctcaagagtgaactttattccagttcctaataagttcctcatttcaatctgagacctcagcagcctggacttcactgtccatatcattatcagcattttgttcacagcaatttactggtctctaagaagttataaactttccctcattttcctgtcttctgtccctcaaaactcttccaatctctgctcattaccaaattccagagttgcttccacattttcaggtagctttatagcaaagccttactcctcagtatcaattttctgtgttaggctattcttgcattgctataaagaaatatttgagaattagtggcaggcacctgtaatctcaactactcaggaggctgaggcaggagaatcgcttgaacccgggaggcagaggttacagtgagccaagattgcaccactgcactccagcctgggtgacagagtgaaacgatgtctcacaaaaaaaaaaattagccaggcgtggtggcacatgcctgtaatcccagctacttgggaggctgaggcacaagaatcacttgaacgtgagaggcagaagttgcagtgagccaagatcatgctgatgcactccagcctggacaacagaagaagactctgtgtcaaaaaaacaaaaaaagaaatacttgagactgagtaatttaaaaagaaaggtttgcttggctcacagttctgcaggctgtacaggaagcacagtgctagcatctgctcagcttctggggaggcctcagggagattttactcatggcagaaggtaaagcaggagcacgcatctcacatgggagaacaggagcaagagagagagtgggtggaaggatgtgccacacactttaaacaaccagatctatgagaactcattcactaccatgatgatggcatcaaatcatcaaggatctgcccccatgaccaaacacctccttaactaatttttgcatttttagtagagacagggtttcaccatgttggccaggctggtctcaaactcctgaccttaggtgatccacctgcctcccaaagtgctcccaaagtgctgggattgcaggcatgtgccactatgcccggcctgaatctttagcttttatgtgcataaaaagtctttatcttaccttgacttttgaagaatatttttgctggcaatagatttataggttgacagttgtatttccaccctgctttatttatttataattttttagagtccagttcttgctttgttgcccaagctggtctcaaactcctgtcctcaagtgatcctcccacctcagcctcctaaagtgctagtgtaacaggcatgagctatcacacccagcccctatagtgctttaaagttgttgtgccactatcttttcatttgcattacttccaatgtgaagtcaattattatttttatctttgtttctctataaataatgtcttttttcctctttttttaagttcttccctttatcactggctttaataattttttttgacacagggtctcactctgtcatccaggctggagtgcagtggcatgatcttggctcactgcagcctcaacctcccaaactcaaacgatgctcccatctcagcctcccaagtagctgggaacacaggtgcacaccaccacacctggctaattttgtttattttttatagagatgaggtcttactatgttgcctaggctggtctcgaactcctgggctcaagcaatccacccaccacagtctcccaaagtgttgggatgagccattctgcctgggttggctttaataaatttttattataatgagtttcttatgattggagcttatgatttttaacaaatctgaaaaaatattggccattattttacttaaatatttttctttccctactccctttcagagattcctattacacacatgctaggctaattgaattagtcccacagctcactgattctctgttcatttttttctggtcatttttcgctgtgtgtttcattttgttgagtttctattattatgttatcaagatatttaatcttttcttctgtaatatctaatacactgttcattccatccagtggactttttgaaatctcattgtagttttcatctctaacggtttgatttgtatcgttttttatatcttccatgtctttgtgtagtctttcctctagctttttgaacatatagaataccatcataactattaatactttttaatgtcatttttgggtaagtttcaattgattgattgttttcttcctattaggttgtattttcctggtgttttggattgccgttaaattgttgttaaatgccagacattgtaaattttaccttgatgggtgttggatgtttttgtattcctatgaatatgcttgaactgtgttctaagaaaaagttaagttacttgaaaacagtttgatccttttgggtcttgcttttaagctttattaggcagaactagaacagtatctagtccagcagtatatagtctaattttgcctccctactgaggccaaccacttctgagttttctaccttatgcccttattaattatgatatttttctactctagctggtaaaaattgaaactaaacctgttttgtcattgattgttatttcttctaatcctttatggctattctttccctggacgagaatagtttcctcacacccatgcatggattgctacacaactgaagacccatggggtaccctttgcagatctctggagttctctagaaagaattttaaagtactttaaaatagctctttcctgacactctgacctgaagctctagccacactgacctccctggactccaaatgtaatgtcttcaattctgggtccctcttccttgtgccatacatagcctgaaaactctctcaaggttgtaagctggaacaactgtagggctcatcttgtttatttccagaatttcaaggatcactattattgcctgatgtccaatggcttgaaaaccactgttttgtatattttattttttccttcatatacttaggcaagaaggtagacccgatgcctactagtccatcttggctaaaagcaaaagaaccagacactaatgtcttgattttagtagtcctagcagcatgcttggcattcactgaataaataaataaatgtccacctaaatttaaatatttaaaaagtttactacgtaaatagccttaactgagttcaataggttttggtataaaatgctttgcttttaagtacattctagataatttatatttatttgttttggtttccaattaagaagattgtttaccttataaatcattaaaattttagagaggtcatcatttgtttatttctatatttaatgagttttatcagagattgtgcatctctgaaatttaagattttgtcaccaaggttataatcaatttttgtaaatgtcccatggctttttttttttttttgaaagagtctcactctgtcacccaggctagagtgcagcagtgcaatctcagctcactgcaacctccgcctctcgggttcaagcaattctcatgcctcagcctcccgagtatctgggattacaaatgtgcgccaccacacccagctaacttttatatttttagtataggtggagttttgccatgttggccaggttgttctcaaactcctggcctcaagtgatctgcccaccttggcctgagccaaggtgtgagccactgcacccagccttgtcccatgatttttttccatgcatgaagtgtttttatcttctctgagtgtgctaagagatacatcattcctctctctgtggcttatgacataaactcaaggatctgaatcaccagggatcttagcccataaagcttaaaattctgttttctctccagactattatctctttcatcggttttatagaacccattttaaaattcaaagccaagattttgactctttattcttgcttagttcttttctgtttcccctttgctgaagcaaaaaaatctgtctcagaatctagttttaatagtataagggatacaagcaaggtaaaacagaattgtcaaaaaggaaaactttctataacatttcaaaatagtaccccactatatgttttgaaaattgtacttttttaaaaatctcattacatgacttaattccttggcttttcatgcgatgcaaggaaacattctgtctttggagggtaaaagaattggcattgctggccatttccaagttgggttacctgggacaagttacttaaactctattacatcatttgtaaagtgggaataataatttgtgggctgtgagtattaaattggttgttatatgtcaagtacctgccaccataaatgacatatagtaacacgttgattattgttaggctttagtaaggaaatacttttttaaaaatccataagtgattcaaatagaggtcaaaggcttcattcagctaatgtgcattaggaagcatctgaagattaggtaactccccaatggaagcaggatcagaacgtctacaggataggggaaactacgagtccttgcagtcttgacttgggcagcaggtttttttgttctttgtttcttttttactttaactgaaactcaaaattgaggatcattcctgttttcatgaccctccttggagttagttggcacaatcctgataaccatcagaacggtattgtctgagaattgtttctgcaagttacttaatgtattagataatcaaagttcacaaggcagcagaggaagctagctaaaagaaagaaaaggtgacaaaagtagaaggcaagggagaaactgcggacactgtcttgtttgttttagaccatttacaaaggcaagcaaattaaggaatatcagaatgatgtttccattagggagaattcacttatagtggaaagaggcaaccaaatcaaagcatcaaagagaaagattttttcttctgagacttttatctaacttcatgattacaaaagtaatacatttaaagaataaaacagaagtgtaaagaagggaaaaaactggctgggcatggtggctcaggcctgtaatcccagcattttcgaggctgatgcaggtggatcacttggcctcaggagttagagaccagcctgggcaacacagcaaaaccccatctctacaaaaaatacaaaaattagccagatgcagtggcatgtgcctgtagtcccagctatttgggagggtgaggcaggagaatcacttgagcctaagagatggaggttgcagtgagccaagattgcaccactgtactccagcctaggcaacaagaataaaaccctgactcaaaagaaaggaagggaaaaacaaagcaaaacaccatcactcaagataataatcattaaccttttagattacatctctctggtttttctatgtatttgtaaaccagatgcatctactccctcattggctggctctgaagtcctaaaaaatatttctccacttacctccctgtttaggttgtccgtctctctttaaaagaaaaagaaaaaagctttagtagtaatcagttagacttcactgaagttttgatttgcgtgtgcgtgtgtgtgtgtgtgtgtgtgtgtgtgtgtgtgcgcgcgcgcgctttctgagtcttgctctgtcacccaggcagtggcgtgatctcggctcactgcaacctctgtctccaggttcaagggattctcctgcctcagcccctagtagctgggactataggaatgcaccaccatgcccaactaatttttgtatttttagtggagacagggtttcgccatgtaggccaggctggtgatccacccacctcggccttccaaagtgctgggattacaggtgtgaaccaccgcacctggcccactgaaatttttttagtgagctttctccacagctaacaaatttagaatcccccttagatatttttattctcccaaacccctcctcaatgcagcctgccccaacctcctaagaagctcttcctttctgcctttgctctcatttgtctctccctgtagaggtattctctaggtcccatatccaaacttacataaacacaaaacaaaagactctctatttagaagacagtttaccaacttttgaacttgaatatccagcttggagtctgaaaaatcactccaagcagtttattaaggattttctccaaataaataagggttctccccaaaaggtgttttggtgaataatatatttttcatatcattacatatagatgtgtacacacacacacattgttttttcttttacaaaatcagtattgtcctatttataaagttttgtatcctactttcatagaatatagtgagcatttttcattttattagagattgtttataaacactattttatatctgcataaaattgcatcatatcataagccacaatattatgcattacactgaatcatatgaaattgatgtttttaaatgttagtaacagtcaaatactggcactttcatatgattcgttctaataattattctcttactgtttggcatttagagcattttccacttttcattttccattcccattaatgatgtgatgggtatacttgtacacaaatcttttgttatttctggttaatattttaagccctattcctagaagtgaggttgaactaggtcaaatagtaaacaataagaataagaataaactgctttccataaatgttgtaccaattcttagtcccattaggaagtatctccatcttaccataccctgaacagcattattgtcactaaaaaattgagacccaacaaatagtatttctttggtggtgatttttcctccaactcattatttatctttggtggtgatttgatttacctttcatttattttattgtaattatttgactaattttcatgtttattcactatatacaatctttttgtgtgtgattcttctagtgatgttttctatccagttttttcattaatattattttcaaaatgaggatcctaattctctatcatatcagttgtaaatattttatgccaatttgaaatttatcttttaattttaggaatttttaatatatagaagctttaacttttcatggaatccatgtaatcccatcgctttttatatttaaatagttccctaagaccagagtaaactaaatgttctttgtcacaattttcaacataataaaagttaactttattctaaaattatactcctggatgtaaatgtaatggttcccaatattaaatcatatgaacaaatgtatttgtaaacctcctcatcattaaggagccaaaaactttctaagtccatattctgatagtacagcagaagtattatctacatataatgaggaaaacactaataattcactcatagatacctgtcattttttctccaactcaagtatgattcagttcatggcatcaatttcaatatttattttaagatagtttttaggtcctaaaaaataaattcatgtaacattctatgctagagaagtaattaattctcctagctgagcattactcttcatttcttcccaaaccaagtatctaacttgttttcaacagaaatatatttttgacttctacctaacacagcagatgagtcctgcctatgaaaaccattaatctatccctaacagtctctttctattcagtattgtcaaacttaagaaacaaggatttagtatgtaaggtcatgatttttgtactgtaggagaaataaaatgcatgccaatcctttaaaagtaaggtacttctggagccaggcatggtagctcacatctgtagtcccaacagtttgggaggccatgacaggaggatggtttgaggccaggaattcaggacaagcctgggcaacacagagagactgtgccactacagaatcaaattagccgggtatggtggtgcatacctgtagccccagctattcaggaggctaagacaggaggatcgcttgagcccaggagtttgaggctacagtgagctatgatagtgcctctgcactctagcctgggcaacagaataagaccctgtctctataaaaaaataaataaataaaagatcattcctaacctcagaaaaatacagaggtactatttacaagaaaattttaaatctttatgtaatagtatttatgtaatatttctgcatttaaaatgtcagaagtcttattactcatgctgtcttatataactggcaagtagtagggaaaatggatggacaaacataccaaacacagcacctaccaaagttcatctaccactctaaaataacacacagttagtcctctatatccacaggttctgcatccgtgcactcaaccaacaaaagatcaaaaatgtttggggaaaaaaaagaatggttgtatctgtactgaacaagtacagactttttccttctcattattccctaaacaaacagtataacaactatatacatagcatttacattgtattaggcattataagtaatttagagacaatgttaaatacatgggaggatgtgcataggttatatgcaaatactacaccattttataaaagaggcttgagcatatgtgggttttggtatccacaggaggtcttggaatcaatcccccacggataccaagggatgactgtagttccccagaaagaagccagttctctatatgtaattcaccaaaggaaaaagatctctgaggattgcatcagggataaaaagaagactttcatcaatggatattatttccatagctcccatacactgctgtactgagacagattgcacaaaggtgaattctgcattttatacttagcaaatctagaaatgaaaaaataaaattctatccaacacaaaataagcaaaattttcattaaatcttaagacctagtaatctaagaagcctaatagagaagttaatcaaaactggaatgtaagcataatataacagaataaaatacagaaaaatgagtggagtaaatgaaaatcaaaaacagtattttcaaacccaaaataaatcaccatgcattttaatttcattttaatctacctgttggataagtaacagattcatagaaagacaggaaataccagaccaccattattgcctgatggcaagagacagacttagccccttcaaggagtttgtgtttctactgttctaagaacacatgtgatatcttaattctattcaggaaacactgcagtctttgttgtgatatttagaaataaacagaatccggccaggcatggtggctcaggcctatactccactctttgggagacctaggcgggcagattgcttggggtcaggaatttgagaccagcctggccaacatggtgagaccccgtctctaccaataagaaaaaaaaaaacacacacacacacaattagccaggcctgatgttgcatgcctataatcccagctacttgagaggctgaggcaggagaattgcttgaacctgggaagcagacgttgcagtgagtgagccaagatcatgccactgcactctagcctggtgacagagtgaatgagacttcatcccaacaaataaatgaataaacaaacaaacaaacagaatccaacaactacaaagccatttagttgtagtttacttaatagtttcctatttgtcattttaatgtttaagaaatgaacattttgaaaggtgttattgattataaacagaaatttatctcagtctacctatttaaaatctaaatgtaactctaaccacaaatggtggttcaacaaatggtaatgacaagattttccttttcactcttaagttccggtctcagttcttccgctaattaagtcattagatatataaccttgaatgtgtcatctagtctctctgagcttgaatttcctgatatgtaaaataaagacattgcattatataatttcaaattatcttctagctataaatatcaaaatcttataactatattcatttatcaaacactcactgaacatcaattataggcataccttcagagatattgcaagtttggttccagatcatttcaataaagcgaatgtcacaaaaaaagtgagtcacatgaattttttttgctttttgtttctgaatgcatataaaagttttgtttgtattatatggtagtctatcaagtataatagcattatgtcttaaaaacaatatatgtaccttaatttaaaatactttattgctgaaaaatgcaaataattatcggggccttcagtgagacataatctttttgctagtggaggttcttgccttgatgttgatggctgctgactgatctgggtgatagttgctgaaggctgaggtggctgtgggaatttcttaaaataagacaacaatgaagtttgccacattgattgactctcctttcatgaaagatttctttgtagcaagtgatgctatctgatagcattttaaccacagaacttctttcaaagttggagtcaatgctctcaaaccctgctgctgctttattaactaagtttatgaaatatcctaaatccttcattgttatttcaacagtgttcacagcatcttcatcagctgtagattctatctcaagaaaccactttctttgctcatccataaaatgcaattcctcactggttcaagttgtattgtgacactgtaacaattcagtcacattttcaggctccacttctgattctacttctaattctacttctcttgctgcttccatatctacagttacttcctccactgaagtcttgagcccctcaaagtcatccatgagggttggaatcaacttctttcaaactcctattaatgttgatattttgatctcctcccatgaatcaaaatgttcttaatggcatctagaatggtgactccttcctaaaagattttttattgggccaggtgcggtggctcatgcctgtaatcccagcacttggggaggccgaggtgggtggatcacctgaggtcaggagtttcagaccagcctggccaacatggcaaaaccccatctctactaaaaatacaaaaattagttaggcatagtggcacgtgcctgtaatcccagctactcaggaggctgaggcaggagaattgcttgaagccgagatcgcttcactgcactccagcctgggtgacagagtgagactctatctcaaaaaaagaagaaagattttctacttactttgctcacatccattaaaggatcactatgtttggcagctacagctttatgaaatgtatttctgaaatactgacttggaagctgaaattactccttggtccatgggctacagaatggatgttgtgttagcaggcatgaaaacattaatctccatgaacatctccatcagagctcttgggtaaccaggtgcactgtcaatgagcactgtcttgaaaggaatttttttctgagccgtagttctcaacagtgggcttaaaatattcagtaaactatgctataaacaaatgtgctgtcatccaggctttgtcatttcatttatagagcaaaggcagagtagatttagcataattcttaagggccctaaggcttccaaaaaggtaaatgagcattggcttcaacttaaagacactagccacattagccactaacaggagagtcagactgtccttcaaagtgttgaagccaggcattaacttctcctctctagctatcaaagtcctcaatggcatcttcttccaatataaggctatttcatttacagtgaaaatctgtagttagtgtagtcaccttcatcatgatcttagctagatcttctgggtaacttactgcagttttttcatcagcacttgcacttttatgttatagagacagctactttccttaaacctcatgaaccaacctctcctagcttcaaacttttcttctgcagtttcttcacctctctctgccttcctagaactgggagagttggaatcttactctggattaggctttgacttaagagaattttgtggttggtctgatcttccatctggaccactaaaactttctctttatcagcaataaggctgttttggtttcctaccattcttgtgttcacattggcatagcactttgaatttccttcaggaacttgcccttttcattcacaacttggctaactggtgtaagaggcctagctttcaacatggcttcttccctaaatttaatcaattatagcttttgattgaaagtgagagacaactcttcctttcacttgaatatcgagaggcgattgtaggcttattaattggcctaatttcaatattgttgtgtttcagggaatagagaggactgaggagagggagagagacaggcaaatggctggctggtagagcagttagaacacacaactcttatcaattaggttcattgtcatttatgggagaggtttgtggcactccaaaataattataatagtaacatcaaaaatcactgaccacaggtcactgtaagagatataacaataatgaaaaaggttgaaatattgcaagaattatctaaatgtgacacacagatatgaagtgagcatatattgttagaaaaatggcactgacagacttgctgaatactgggttgccacaaaccttcaatttgcaaaagatgcagtatctgcaaagcacaagaaaatgaggtatgcctgtatgttctatgcactgggttaaatgttgacaatcaaaaactaattatgccatttactgaggatttatatgacaggcattatagtaaatgtttagcatatattttctcatttattttttgtcttcacaatagtcttaggaattggatattactatagcccattttatagccaaaaaattctcacccagagctttaaataatagctagttagcagggaaccaagattcaaacccaagaatctctgactcccaaccctatgtttaaccagaacatcacgctgccaccaagaaacttatggtcatgtttcttgacattatttgtgtcagaattacttggggtgcttatttagaatgcaaattttcaggcttgctttactcaagttctactgaagttgctatctctggagtggagcctgtgttttaaacaagtgattctgctctgatgattcctatttatactcattttgaagtctaatatacagtttataaatttatctacatgcattaaatatttaatgaatgcccattatgtacaagtcacactatactagatactgtgttagacacatcgttgtatgatacattttgtgtctgattgcaagcaagagacttgacaataagacacatacaaatacttacatcacagaacattcttggaaattatgagatcctgctttaactgctataattgctgtcctataattgctcttgtattacttattcatgcacatattatctttgtcacacagaatgcaaatcctttggaggctgctattcatcttttatttacatttgtcctttcagcaaatatttattaagtacccactgagtgcaaaacaagtggacactagaattatactggtgagcaaaaacaggctcagttccttcatggagcttttgatctagtgtgtgggaagccatttgttaaataatcagacacatgcaaataatgtgaataatcagaaatacagcatgtacaaatcactactatgatacatgatacaaagaaatggtactcttggctaaaatgaaaagatttggtctggtcagagaaatcaggaaaagcttccctaaagaagcaaattttgaatgaaaatctgaaacatatacaaacactaataggtaaaatgggaggaaaaagaagaagtatccaagaaaagggtacagcacatggaaaggcatttgtgacagatggaaacaacaagaacaaagcattgataacagccagtatacctggactggagagaaggaaaaggagctgaagagttcatcaggagtcaaacagtctagggccttataggtcatgtgaagaattttgtcttagtcctagaaataatggcaaagcaataaaggaatgtactggttattctccatttgctttgccccatccccagactcattctccactttgagccctgggagactgaccccgtggactgcatcatctggtctcctggtccagcttctgtttggagttggacaatgggaagcacatgcaggagaccagtgagaagaaagaaaagaaagtcagagtatttcttctccactcccactctactttagggtctcagttctagtactgtttgcatacctgaacaactatgactcctgcccaccaggccctcttctaggggtctagactccaataacactatttcagtcctcttatcccttcaggcctgaggatgataatggcttcctgctattgctggtctctgggtgcaccagcatttcttggttttcttaaccctgctcacacctttgaaggtagttcctcttcattaaaatcctttcctctgagttgaattgtttcctgctagggccataaggtatgtggtatcaatccctaggtcctagtttaaaaaaatatatacaatgcaacactcaaaaatatctgacaatcaaataaccagactgactttttcccatcataaaacagtccatggaattttcttttgcctcttagttacacttactattttattgtcaatagttggtcttcttaattattaaaagattcttggaggactataatcattaccattcatacaaacagatttcttgccatccaaaggaattagtgtgaacaatgcctttatagtgtagacataaaaagcgtggactcagagagacctggatttagttctttgctttgccacttagtattggtatgcccacagatatattttataaaacactctgaatctgtttcctacgtaaaatgggaacatttattcttatcttaaaggatttttgtgaatattaaataaaattatgttaaggaactggtagagaaaaagtacttaataagcagtaactatcgttactattacacctatttaatcatggataaaaaagaagtgacaagtttttagaattgacatatgttcatggtttaaatagaaaaccaatatggaagaatatgaagtacaaaataaaaatttctcatttctttccttcacctcctaattccactattaaaaggatatgcaactcacgcctgtaatcccagcactttgggaggccgaggcaggcggatcacaaggtcaggagatgagaccatcctggctaacatggtgaaaccccgtctccactaaaaatacaaaaaattagccaggcgtggtggccggcgcctgtagtcccagctactcaggggcgggcgggacggaggggttcgggggggtgggaggggggactgaggcaggagaatggtgtgaacccaggaggcggagcttgcagtgagccgaaattgcgccactgcactccagcctgggcgacagagcaagactccgtctcaaaaaaaaaaaggatatgcaactttatagatattttccatactatactctgcatttggagaatgaagatgaaataacacatttgggaagaagaatcggcactcctcctgttctttatgattgagatattcagagaagcatgtgtatcacaacaataccatagaattcagataccaccctaatatcaattcagttcacaaagaagtacaattttggaaatagagtgaacgaatttttatttctgtatctctggctgggaaatcacttggactaatttagcacagaatagtaaataattctgattcttaataccaacaatttaggcagctgaaaggagaggatataaagccgaatagcttaaaagtactgggacaatgggaaaacactgtcaaaaatgattctgatcattttactcaggacccaaagattggattcaggtatcttatatcaacctatagaaataagtaatttccaatcacttactacagatttttttaatcgtctactggtcttttttacaacaggtagtttctctgaattccttaaacctttctatgaaataaagcatgcatccatgtaccagcaagtaatgagaatgctacttagggaaaacttggtaactatgtaaattgttaaatttactctgtatgttttctgagtcagaccacaggaggacactcctacaaacatcagaaccccccatttccagaccttcttgaagtccaaggacactggctagctctgaaattcagtcactttttcccattagtatcctctcattccctttagccatggagaattttgaaaactccccattccaagcccactggccacccttcttttcctgagtcccaaatcttctgaaggtgtttgatgtcccaggcaccttcagaaagcctgtgttgtactgtaatattttatgaacaaggaaagaaaaatcctgaatattgtattttatatcccaattgaaatggtctatgtcaaagaagaaactacctaaaatatatatacatatatataattattcatatatatatataaaatccttcatatgtatatatatataaattcttccccacacatatctttaaggaatacatttgccttgaacatttagcaaatgaataaatgaataaaacaattattgtaagatgacaaatggtaggaaatttgaacttactacagcatttaaaatgtatcttatatgtttgtactttaataagttacatagtatatgcatagcatggtttactacatgatcgaatcacactgatcagtgtgatacacaaaataaaaatatatagtttataaatatgaactaacgtctatgagggtatctccaattattccatatacaccgatgctaaatgatcaaattacacttgtaaactggttcatgtaagattcttagaacacctggtaatgaaaacattttattatttttatgaatgtataatgtcttgccattgccagaaacattcttttaaattttcgtttaactaaaaaatggctcttgaatatttgttatgaaaaagactactcaggatggagacctctgtgccaagttctagtcccgaaattttttttaaatacaaagacttctttaaattacaaagacagtttttgcttttcagtttgtcaaagtatttcataataatataaactagaaatagaaagtaaagggggaagatactgtccggaatgctgtaaaacaacaatatacctggcttttacccctctctctcatcaaaaacaaaccaaactataaacatttatttgtgcttttgtgtttgttatttcatctttttttacaatgtgcttaaacctgatggcttatgttttaaaattttacccatggaacatcacttgtgagtcccaacacagaagaatttgtatttctcttaatagcaccactgtgtaaatagtgttcagccacctaaacttttctatttttctctcacccccaggtactcaacaaatacttgtagaatgaatgaataaagctcagtgaaatgtcctgtcttaccaataatacaacttccatctaacctttcactttttaacagctcttttgtcaaatcaacaaatctaatctgctgctaaagtcactgtcaatcaaactccaaattagttacataaagaacaatgcaataacttccttttagagttgaatgatagacaaaagtttgtatcatttaagaaacacatatgcttcctttttattaaatattatgattttcatttattctggattaccagaaagcctaaaaccagatattgtaatcaattcagctaaaatgatcttcatttcattccttgaaaatagtttactttgtttcaagaattacaatgagtttcccttctggaaatacatggaacctactgtgtgcaaagtattgtaacaaataagacaagttccctattctcccacttacatttctactgttaattacaatgcaaaaaatgcaaaagaccaaatggataacagagtgacaacaagctaggcaaacaatagcaggctcttattaaaaaaaaaagtatgtaaccatttattgaacacctttgtatcagggactttggtaaacattttatatacaccaccacaataatcctgcaaaataggtattgttatgctcacattgatgtcagaaaacaggctcttagcataggacttagcacatgccaggtattcaacaaatacatgtggaatgaataaagcttagtgaagttccctaattacacaggcaacaagttaagaaggtgtagaacattatatgtacctatagaatgtccaaattcaattttataaaataattaatctaaactgaattctacccagtttataggtgggctttataaaacatagttcagtaaccagccttctggataccttctgaataaactaggttaccttctggataaactaggttacaaattataggaaatgttttgaaagggaaagaaaatttaaataattttccagtgagaatattcaaatacactcttgacaactttttaaaacattatttaacaggaaaaaatatatatttgtcatgaagcaaactaaaagaaactaggcatcaggccaggtgtggtggctcatgcctgtaatcccaacactttgggaggctgaggcgggtggatcacctgaggtcaggagttcaagaccagcctgtccaacatggtgaaatcctgtctctactaaaaatacaaaaattagccaggcatggtagtgggcacctgtaatcccagctactcggaagcctgaggcaggagaatcgcttgaacccaggaggtggaggttgcaatgagccaaaatcatgccattgcactcctgcctgggcgacagagcaagactctgtctcaaaaaagaaaaaaaaaaagaaagaaactagaaatcatctagtcttccaccccttctgcttatatgcataaagaattaggcatttagaccaggtgtggtagctcacacctgtaatcccaatactttggaaggtcgaggcaggaggatcacttgatgccaggaattcaagatcagcctgggcaatatagagagacctcgtccctaaaaaacaaatttaaaaattagctaggcatagtggcatgtacctgtggtcttagctacttgggaggctgaggcgggaggatggcttgaacccaggagttcaaggttacagtgagctatgatagtgccactgcactccaacctggacaacagagcaaaatcccacctctagggggaaaaaaaactatgttaatgggcatacaatgtataaagatttaatctgtgacaatcacaacatcaagaggcaagaatggagcttatatagaagcaaagttttgtattctattgaaattaagttggtagtaattcaaactaaatcgttatatattaagatgttaattgtaatctccaggaaaatcactaaaaaaataaccaaaatatattttagtaaaagaaatgagaaaggaataaaaacagtacaatagaacatatctaattaacataaaagaaggtagtaatggagaaatgtgaacaaagaaatgacacatagaaaacaaatagcaaaatggcagaagtccttcctaatcagtaattacactagctataagtggattcaactctctaattgaaagggggaaatttacagaatgaagaatttgtaatttgattgtgcaaatgtgatcttgaccaatgtttaaatcagtaagactagcaaggttcattattgtgtccgtttatgctataagatattgtgagaggaggctgggtgcagtagctcacacctgtaatcccagcactttgggaggccgaggctggaggatcacttgaggcctccagtttgagaccagcctggacaacaaaggagaccccatttctaccaaaaaaaaaaaagtttttttaattagctgggtatagtaacacattcctgtggtcccagctactcaggaggctgaggctggaggatcacttaagcctgggaggtcaaggctgtagtgagctatgattgaatcactgcactttccagcctgggtgaaagagtgagaacctatcacaaaaaaaaaaaaaaaaaaaaaaatatatatatatatatatatatatatatatatatatatatatatatatatatagtgtaagacggtattttctagtaatggtcatgtttagcaaagggcagtggaaaaaagggcccagcaaacatgcaggaaaatgagaagcagagaggggttgggtggaggaagctaagatatagggggtaggagggagttcactccagagttccagagttgggtctggagggggagaggagtttgagtttggatttttggatttgagaccctgtacattttcattaaaatgacaaattagccattttaatatactttattattttaatagcataccattagaaaaccatttttttttctgctatatctggatggccctaataaattattctaggcaaaaattctcctatctgcacattgactctttgtcatgttcactatcatttctttctctatgttactggcttattttcaccttcagattttgtttttacttttagaatgaaaaaatgcacactgggaatagatgtacctttccataatagtgttatcactttaaataagcgaaatcattcaataatgagtggatcttaaaggcagtgttctccttcctagttataacccagttctttactctttcccagtagtactccaaaataaatgccaaataaaatccttaatatggaatttcagttcaaatgctcacaaattaagcaaagaagcagtgttttatttaaaataaattagtcagtttttccattttctctttcagccttaagaaataagatatagttagttttaaatgtaaaacttagtacactatgcaaatcatgtctgtgtgtcaaagaaaaataacaaacttaatgaggaatgttaaaaaaaaaaaagcagaacccattagtttaaagatacataggaacagccaaagatgacaaacatacacaaaattcaaaacatggtagggaaagggaataggcactgaaacacataaatcagtgttttgaattctttttctctgtggatataattgtaccttagtttcttataatgatttattgaggtaaatattctgtatggtttaacagctacagcttcaaagtgtcaggcacaagctctcctttattcatgaggcaactgagtattgggatgtgaattcacttctgtattccaggacttggcaaagtttgtttttaaggtccttataaagaattcatgttgatgcagtctattcaaatgtgaaaaacactgtgctataatgagtgaaatagaaaacctttacagtaattctagagaaaaaagtaaataaattgaagtaagccacacagaattactttcagcaaagtaaagaatgcccctgagttcatcttaatccactttttcagattttcagatttagggatgcctacaaacccccttcatcagatgggttactatactaggaactgaatctaatatcaaaacaaaaagaaaataatcagagagaaatagaattaagtctctgtctataatattcagataagaaagtattttgggttgattttcaatttgcacatgttactgctctgagaccaaggtatttccaacagcaaacagtaataacagtcacacagtagtttattaaaactaccatatagccactttatagtttggaaaggggaaacaagtaatttaccaaatatatttccttttaaagtattatgccaatagaagttatacatggatacttagggcatacagacctaatgaaaccttgaaattcattgatcttacgtttgtttatgtcaagcctttcagcagaaaattcagatttttgccaagaaatatatgtgccttagatgtataagctcaatatgaaataaagatttgacctgcctagacagtggtcctctgatgcatccacattcttatgcatctgccaaagtggctttatgattccccacaaggtagtttgatagtttgatggtataggtgccaaataaaagtaaatttaaaaaaattaaaacacatagtttaaaaatatacctacattttttgtaatgagattctctcatttccagataatatatcttatgctttcaaattttgttcaattgaggaagtattttgcattattagagagcaagatctcactaataaatggcttttgccttcttgctaattccctttataattaagaattacctaaaaactctgcctgcttaaagctactcattaaattataaactttttctttatcctcatagagcctaacatagccatgcgtggggtacatgatcggtaaataaagacttataccggatagcaacttattagtttaaaatggctctagacaaattgcattacttttcaggtaacatatttttctccccagaataataactttttcacacaaaaaaattcactaaataaatatactataagatgtgatgttttgacattactttctggcaaaacacttactaatttactcaacacaacttctagtcagagaatatcatctggaaaaatatgcattgtgtaccatgtttaaatgacccaaaatgttttgcattgccaatacagaatgaagaggtggcatcttgtacaactctaaaagtagctgatacagttggatatttatccccacccaaatctcatgtaaatcccagtgttgacagaggggcctggtgggaggtgattgcatcattggagcggatctctcatgaatgtcttattgctgccctcatgatagcgagttctcataagaaatggttttttaaaggtgtgtggcacctggccaggcatgctggctcacacctgtaatcccagcactttgggaggctgaggagggtaaatcacttgaggtcaggagttcgagaccagcctggccaacacagcaaaacccagtctccactaaaaatacaaaaattagctgggcatggccacaagcactggtagtcccagctacttgggacgctgaggcacgagaatcacttgaactcaagaggtggaggttgcagtgagttgagatcgtgcgactgcactccagcctgggaaacatagcaagactgtgtctcaaaaaaaaaagaagtgtgtggcacctgccctcttctcaccatgtgagaagtctgttcctcctttgccttccactataagaaaaagctccctgaggcctccccagaagccaagcagatgccactgccatgctttctgtacaacctgcagaactgtgagccaattaaacctcttttctttataaatttcccagtctcaggtatttctttatagcaaagcaaaaatagcctaacacagtaactttctgtgctataacttcaagttaagttcatttgaagccaagataatcatgagctcctaaaagtctaaaaaacaattgatgcagaaaatggtgcagaaagaagaatgcaccttccaaagaatgaatatctcacacttctcctctaccagccatccattatcaattctttaattcgttcagcaaatacaataaaactttattactttataatttttgtataatctatatttatttactttcaaatgctatttattacttatttatgcttgctttcattgttcatcaaatgctatatttttctgtgaaaagagagggtatcttggattggtataaaatgcattataatttttcctattagaattaatgaaaatattttctgttttataggttttcactaaagagcagaattttccaaaacaaaattaacatcttgaagggagagataggtgtaccctattcaacgtttctaaaattatcataaaactagagaagaaaagaatatcaactctgcatcccatatttttcaggtagtattcaagtatatgtgttagttcattaatccttagaataaccccacgtgagaagtaccttttgagaaggtgagaaaactaagactcaatgatgtgaaatgaagtgttcaaggtcatacaactaataagtggacgagccagaactcaaatcaaacattgccaagtccaatggccatttctctgtgcttatcttcacttctcatcagcattcaatgaaatcatcaacttcctccttcttgaaaccctgagttctcttggcctccaaatactgtatctcctggtttatttcatccttattaagagttactacctcttagcctccagtgttgaactacctcttttatctgacttacaagttatagggtttctcagactcaggccagagccatctgaaatctatctcttttcctggatgaccttatccattcccatggatttgaataccatccctttattgataactcccagatatatctatacttagccacgacttttgtgagcttcaggtttgactatctatctactttgtttcttggtatttccacatatatatctcaaaaacattataaatttaatgtgtccagagaaaaagattaacaaatcatgatgcctacccacccaaatctgtctgtctcctcccatttgggtaaacagaaaatttgtccataagttgttcaagccagaaacctaagagccatctttttattttccttttcattatccccaattctaatccatcagcaaatcctgttgtttctaagatatatcttgaattgctctatatctcttcagctccacctctaccaccttaacccaggtccccattatttctcacctgaactatgcaacagcttcacttctactcttgacctcctccaatccattctccatactgtaataagagtaaatgtcttaagacatcaaatcaatcactctcctgctaaaaacattacagcaggccaggcacagtacaggctcatacctgtaatcccagcacttggagaggccaaggcaggtggatcacttgagtccaagagttcaagactagcctgggcaacatgaggaaaccccgtctctacaagaaaaaaaaatgttagccaggcatggtgggcctatagtcccagctactggggggtggagatgggaggatcacttgagcctcggaggtggaagctccagttagctgtgatcgtgctactgcactccagcctggacgacagaaggagatgctgtttcaaaaagaaaaccctacaatggtttacttttaagataaaatcttaaaatggcacttaagatgaaatccaaacttcatttcatgatctaaaagctctgcctatctttccaacctcaacttatgccagtctcccctgttttcactatactctaatacttactgatcatctttctttttttttctcagctcaaaatgttatgtttctttttttccataagtgattggggtacaggtggtatttggttacataggaaagttctttagtggtgatttgtgagattttggtgcacccatcacctaagcagtatacaccgcaccacatgtgtagtcttttatccctcatccccctctcacacttccccgcaaatccccgaagtccatcatatcattcttatgcctttgcatcctcataatttagctcccacatatcagtgagaacagatgatgtttggttttccattcctgagttacttcacttagaataatagtctccaatctcagccaggtcactgcaaatgctgttaattcattcctttttatggctgagtagtattccatacacacacacacacacacacacacacacacacacacacacacaccacagtttctttaaccactcattgagtgatgggcatttgggttggttccatgattttgcaattgtgaattgtgctgctaaaaacatgcaagtgcaagtatctttttcatataatggcttctttccctctgggtaaatacccagtagtgggattgctggatcaaatggttgttctccttttagttctttaaggaatctccacaccattttccatagtggctgtactagttttacattcccaccagcagtgtagaagtgttccctgttcgccacatccatgccaacatctattttttttttattttttaattatggccattcttgcaggagtaaggtggtatcacattgtggttttgacttgcatttccctgatcattagtgatgttgagcattttttcatatgtttgttagccatttgtatatcttcttttgagaattgtctattcatgtccttagttactagaacacactaagctcttttcagcctcaaggccatttcacatgctgttccctttacctaaaacacttccccattaattacctagctagctccacctcaccctgaatcactaccttttgaagcagacccacaccatactgtcacagtcccttgtttgttccttatggcacttactatataattgttttatgtagttgtctttttattgtctaccaaactagaatataagctccataaaggcagagactaattagttcaattatttatactgttaattattatatttcccatgcctggcacaataaataatagctctcaataaatactgtgaatgaatgaaagccaggtgtgactgattccaaacaaatattctctccactatatcatgctgccaccttaaaggatcttagaaatcatctagccgaccctcttcttttacaaataaaaaactgagatccagaaagacaagtgatttgcccaaggtgacacagcattaactgacagagccacagtgaccccagactttctgatttctgaatcagattttttcttagacagcacatggccttatgctaataggtgcatccaaactatacctaagaaattttctgcaagtatgaggtggccaaaaatatcagaaaaaaacattttaacaagcatttacaaactaataaaaaactagaaaaaaatacaattataacagtagaatacaatgcattacattgccaaaatcttttactaaattgtttttaaaagaaaaatttgagaatatagacaaaatagtcctctattttacattacataaataatttacttcacaatataaacaacattttatttcatatggataatacattcagaatatgcctgcttagagaaatcatacatgtgctattgtggaaacaataaataaataagtaataaaaaatttaaaaaggagaaatcatactttgttcctaaaaatttaagttttcctaatagctagtaactctaaaattcatatgagtataaaatttgcacaattttgaaactaaacaagaaaccaagcaaagtatctagagttaataataatagataaaagaaggaacagccaaacccaggaatcctacactgcctactttcagaattcagtcactgctctgcaaaacactaaaccatgtatcaatttactcaatccatgaagcaatgtcacaactacacttccccagctccttccactcctgcagaactcaaatcaggcagctactaaatcatctcaagttgctcctgtcacttggagaaccaatggagaaaactgtgatccaacttttctttgccaaaaatgttttacttccccactaagcacatggtgtccatactcacgattctgcccatgtgtgaatatgttttttaattgccataataaaaagctagaaaatataacctccatcatgaaccacttagttgttaaaaacatctatgcctccatttaactccttcctcatattccaaagaattctacataatttttcaaaagtattagaaataataaaatataaattatttgacttttagcattgcaacactatttattactgcaaatgataattagtttagctatcttatagttcaaataggtttatgtagactatcctagcgaacaagaaattatgtacagcattgttgtatggaaaaaaaaaatctgcttccatggaacttttgtttgatttccaacttccctaaaattactaaactttcaaagttcttttcatacaatgtcatgttcattgtttttccctcagaaaaatttccctcataaaaaagaggttattataaatacctttgttatttacctaccagttgttccaaatgtgtcttttaattttctttcttttttttttttttttttttcagacagagtcttgctctgtcgccaggctggaatgcagtggcgcatctcggctcactgcaacctccgcctcccgggttcaagcaattctcctgcctcagcctcccgaatagctgggactacaggcgagcaccaccacgcccagctaatttttgtacttttagtagagacggggtttcaccatgttggccagaatggtctcgatctcttgaccttgtgatccgcccgcctcggcctcccaaagtgctgggattacaggcgtgagccactgcgcccagccgttgtcttttaattttcattaggtcttttatgtctaccagatgtgtctcttgctgctcctcattagaatatgcaaattacctcagtatatattggacttctgtagatttcaaggctctgatttaaaagttgtcatttagaatccggcaaaacagtcctgttggaaaagtttcaaaaaataaatttcagtactttggagccctttcccactatagaaactaaaaaaatcctgtgtcaaacatagataaatgacccattattagagtacattacagtggaatgttactaaaagcatgagtaaatcatgtttaccttgtacagcatgggacctgctcccattctgttatggaaagcctaaacctgcactgtccaacgggatagccaatagccacatggggctctaaggtgctagaaatatgactagccttaattgagaagggctgtagtataaagtacccaccggatttttgaataaaagaatctaaaatatctctcattagtaatttttacaattacatattgaaataatactatttttgatatgttgggttacataacatatattataaacataaattccacctgttgcttttcaccttttttagtatggctactagaaaattttaaattacatatgtgattcacatttgtgactcagattatatttctgtagaatagcattgtcttgctataataaataagatttttatagttaagttagtttttggtgtttttattttccccaaagaaatagtttataattaatgtgttgtggatagcccataggaagcaaggtccttaatgaaaacttaaacttttaatgagaattagaaagaaaaaaaaaaggagtggggaataaaagaggaacagaaacattgtaggaatagataataaacattaatttcctctctactcaaagcaaaaagtactatatattcaaaaacactgtaacagctaaaagtgtttattattattaaaacactgcttagcaaggaagtaaaaaaaaagattaaaacaatagtttaatggttttgaagttttacttttttccaactactctcagttccttgaaggaacaaaaattagcaaaaaagaaaaaaaaatcaactgcttttccctgtatcaaatgataggtagtaagaaatttcaaagttctagtctccaaagaatagtactataatatttttttaaataagcattagaggccagacacggtgattcatgcctgtaatcccagcactttggaaagccgaggtgggaggatcaagtacaggccaggagttcagggacagcctggccaacatggtgaaacctcgtctctactaaaaatacaaaaatttatccaggcatggtggtgcacacctgtaatcccagctacttgggaggctgaggcccaagaattgcttcagcctaggaagcggaggtcgcagtgaactgacactgtgccactgcactctagtccgggtgacagagcaagactctgtctgaaaaaaaataaataaaaagcattagtaatcaggtgtggtggtatgcacctatagtctcagctactagggaggctgaggccagaggatcacctgagcttaggagctggaggccagcttgggcaacatagagagaacccatctctttaaaacaaaacaaaaaaaggtattagtaaggctggtcagtatccatgtatcattttcttctgagaaagttcacatgcttcatattagtgatcatttcatttcaatggttgtaaaggaacagttcaaattttatggtctgagcatatgggagtataaattggtacaagcagtttggaaaaccttttggcattattatctactcctaagcatatccccaacagtaacacatgcacatttatataaaaaatatacaaaaatgttcatagcagcatcattcataataagtcaaaaactggaaacaactcacatacccatcaacaaatgaattcatacaatggcatactatatagaataaaatgaaccaaccactactaaaaaacagtaatgattctcataaatataacattgtgtaaaggaagttagatataaaaaaattgtatgattctatttaaataaagctcaaaaacagaaaaaaattaatttatgatcttagaagtcaggatagttacctttgagggggtcatagtaattgggaaggaaggaaggagtcagcggcactgaaaatgttttatttcttgacccaggtagtggttatatagatatgttcattttgtgatgaatgagctatatatgcttatgatttgtatacttttctgtatgtctattatgttttcatcaaaatataaatcaaaaaataaaatctgtggtcatactaaaattttgttttatattatgaattaaaatatcatttgaaattaggaatatttttgctaaactgagttttttaaatgtggttttatccttaagattactttcatatttgttaaactcatagaatcacagagcgttacagatggaagaaacttagaataaactagtttggctctgtgagaagttaggtgacttggccaagatcctatcagtatcagtaatgagactaaaatttagaactttcatattatattacagaactttttaagtttttaatttcagagagttagactccattagaaagaactaggatttcttctgaaatcttgatttataatgctaaaagaaaaaaatctacacgtcaccaaatgttattcatttttctatttcttttataataaaataatgaataagtcataaaacaaggaaggaaaatcattcttggctgtttggtgaggaactttataagaattggtaacctatgtcctttgtatatctttttgaaacttactcttcatgaaaacagatatagaacatttgtattcaattaccgtattaaaaacagaacagtctcaatacacactaccctctttctcttactttttgcagcttgtttgtaaacaagtttagcagtagcacaatcaagaagtattgattccttctagaaatgcacctacatttgagctattcacaattcacaaaaattcaaggatataactagttattctcctcgtttccttcagactttaaaatatggcaactcttcctctttgttcttttttttttttaagcttttcttctggctcagaaatgtaaaataagctatggcaacatccattataactgttcttttcctgtttttctttttttttttttttccaaccattttgttttgggggagggaaaagaaggaaagttctaagaaaagctttttgtaacaggttcaaaagtataaaagccatttcaagctccagacatttgtagcctttatttctttagtccttgaaagggctttttaaatgttaacagctaagataggactgctttcctatactgatgttccaggcttcatttcctttgtagtcttgagttcttccccatcctcaatcccccaataacctccatgcaggcttctttttcaaaacaaaacaaacaacaatttaaaaaaaaaaaaaatttcattcctcatgatacacatacaagcagacttctaagatcccatacacaatggacatctctaatgacttagagaattaaaatattttgcttgaatttcttctttatttggtgatttaatgtgcccacttatgctttcatttctaaaataataacatgtcacctgcaaagttattacagctaaaatagctaacaagaagctttgttgaccccctcttcaggaatgctgaaatgcaatcttcaaaaaataccagccaaaacatgttcatttatgtgtttaaatttttttaaatcagtatgtacatattatcctggttcagaaataaattacatatatgccaagaaacaagtctgaaacactgtattccaaggtcttaatagtgattattattcctgagtggtgagattataaatgtttttattttttaattttattcttgcttctgaatatattttaatttatcttcagtgtatatgcattgtttgtgacaagggaaaatattactcttcattttaaaaataaatgctgttttattatttttcagcacataatataggtacttttaaaacatccacatatataggccaggtgtggtggctcatgcctgtaatcccagcactttgggaagttaaggtggatggattgcttgagcacaggagttggagaccagcctgggcaacatggcaaaacctttcctttatttttaaaattaaaaaaaaaaaaaaaaaaagagagagacagagaaatccaaaggtatacacttatatttaactactcatattacacaagtacataattttaaaatgtaatttccaaaactgtaaaattataagtcatataaatttaaaaacagcatgagtcaaaatgttgagtgtcaaagagtttacttaactgagtaattaatgaggaaaccagtaagttaaaaccgattcattacagaatttgatttacagaaatttgtattctctactggataaagtccatttgcattgccaagaataggaatcatttgcgttgttatgggccaaaatcatttgcatccttttcagatgtataaaatttaacttttatccctctacagagttgtaaaatagcctagtcaatcaaagatgatcaaaagtacacactcatttagaatcagataatccctggagagtccctacacattcagcactcccctgaaagaaaacccagttatcagttttgcctgcttccaagtctttaacaaattttcctgatataatttactaattagtaaacatgctttcttatgtatcacctagaaatgtttagtaaagttttctgtaccttgatataatcaaggcatatcagagaatatttgaggtgagtataaacttcagaaacttcacaccaggccaggtacagtggctcacacctgtaatgccaacattttgggaggccaaggccagaggattgcttgagtccaggagttcgaggctagcctgggcaacatagtgagacctcacctctacaaaaaataaacaaaattagctatgcaaggtggtatgtgcttgtagtccagctactaaggaggctgaggtgacaggattgcttgatcccaggaggtagaggctgcaccactgcaccccagcctgggcaacagaacaaaattgtctcaaaaaacaaaaaacaaacaaacaaacaaaaacactttatatcagtttaaatcatggaacattagtaaattataaagacataatgaaatattgatatatcaaaaagcttatccaccatgatcaagtgggctttatccctgggatgcaaggctggttcaatatatgcaaatcaataaatgtaatccagcatataaacagaaccaaagcaaccactgtggaagtcagtgtggcgattcctcagggatctagaactagaaataccatttgacccagccatcccattactgggtatatacccaaaggactataaatcatgctgctataaagacacatgcacacgtatgtttattgcggcactattcacaatagcaaagacttggaaccaacccaaatgtccaacaatgatagactggattaagaaaatgtggcacatatacaccatggaatactatgcagccataaaaaatgatgagttcatgtcctttgtagggacatggatgaaattggaaatcatcattctcagtaaactatcacaaggacaaaaaaccaaacaccgcatgttctcactcatagatgggaattgaacaatgagaacacatggacacaggaaggggaacatcacactctggggcctgttgtggggtggggggaggggggagggatagcattaggagatatacctaatgctaaatgacgagttaatgggtgcagcacaccagcatggcacatgtatacatatgtaactaacctgcacattgtgcacatgtaccctaaaacttaaagtataataataataaaaaaaagaaagatgcacacaaaaagaaaaaaaaagaaatactgatatatgaaatagttaatactgtataaagtatgagtaatttttatgtatgcaatataaaaacataatcacaaacaaaatatccatgaggaaacaagctgtcaaacaaaatatgatcaactttgagttttcctatcagtaacttttcgaagttgagaaaattttaagggataaaatcttaaaactgagaaaagtccagtagcatcttcccagtgaaccacaaagggactatactgaggagacccccaactcaaaggaaatagactgtagcaccaattggccaactttgggtaagtagtggggtacattttacccaggtgaaggacgcgaatgggcctgaggcccaacttaggacaatctctcctaagacagagaaagttaaaggcccctcttaataaaaggcaaggacgcttgattaaacttaggttcaaggcccaacttaggaagcttagagtccttcctaagatttagggggttagaggccccactcagaaaagtctacattggttaaaaatggatttggcactatggaatgtgaaccgctattctctttggattaatctgccttgcactctttgctgatggctatgggtgataggattaggtatgtacaagatcatgggacatggggaactttttttctcccccaagggggaaacttgagcgctgatggatctgctggaaaagatcccttcacaactgacaagcagccgcctgaattttgattcagtgtcactgcaatgggtgggtcttttctgtctctctctctctctctctctctctctctctctctctctctctctctctcttcccccccctccctccctccctccctccctctctctctctctctctcttccctccctccctccctccctctctctctctctctctctctctctctctcctgccagccgtgtgaagacttgactgcttccccttcacctttcaccatgattgtaagtttcctgaggcctccccagccatgcctctagtatagcctggagaactgtgagtcaattaaacctgttttcttcattaattacccacttttagggagttctttatagcactgtgataatggaataatacagaaaattgcacagacaaatggaacagaatagagcccagaaataaggctgcacatctacaaccatctgacctttgacaaagctgacaaaaacaagcaatggggaaaagactccctattcaataaatggtgctgggataactggttagtcatatgcagaagatggaagctggaccccttccttacacaaaaatcaacttaagatggattaaagacttaaatgtaaaaccaaaaactataaaaaccctgaaagacaacctaggcaataccatcctggacataagaatgggcaaagatttcatgacaaagacaccaaaaaccatcacgacaaaagcaaaactataataaacttaagaaattctacacagcgaaaaaaaactatatcaatagaataagtagacaacctacagaatgggagaaagtatttgcaaactatgcatctgacaaaggtctaatatccagcatctataaggaacttaaataaactaaacaaatttacaagagagaaataaacaaccccattaaaaagtgggcaatgggccgggtgcagtggttcacacctgtaatctcagcactccggaggccgaggcaggcggatcatttgatgtcaggagttcaagaccagcctggccaacatggtgagatcttgtctctacaaaaatacaaaaattagctgggtgtggtagcacatgcctttaatcccagccacttgggaggctgagacaggagaatcacttgaatccaagaggcagaggctgcagtgagccaagatcacaccactgcactccagcctgggcaacaaagtgaaactctgtctcaaaaaaaaaaggcaaaggacatgaaatgacacttctgaaaagaaaacatacatgcagccaatgagcatatggaaaaaacctcaatgtcactatcattagagaaatacacatcaaaaccacaaagagataccatctcacaccagtcaaaatggctgttattaaaaagtaaaaaacaacagatgctggcacagttgcagagaaaagggaacacccacatgctgctggtgggagcgtaaattagctcaaccattgtgaaaagcagtatggcaattcctcaaagagctaaaaggagaactaccattcaatccaggaatctcattactgggtatatacccaaaggaatataaatcactctaccataagacacacacacacaaattttcattgcagtactattcacagtagcaaagacatgaaatcaacctaattatccatcaattatagactggataaagaaaatatagtacatatacaccatggaatactatgcagtcataaaaaaggatgagatcatgtcttctgcaggaatatgaatagagctgaaggccattatccttagcaaactaacgcagcaacagaaaaccaaataccacatgttttcccttataagaggcatctaaatgataagaacttatgaacacaaagaaggaaacaacagacactgggggcttcttgcggagggggaaggtgggaggagcaagaggagccgagaagataactattggatactgggtttaatacctgggtgatgagataatatgtgcaacaaacttctgtggcatgtgtttacctatgtaacaaaccttcacatgtacccccaaacctaaaatgaaagttaaaagaaaaagaaaaaaaaaactgagaaaagtccatctacagccaggcgcaatagctcacacctgtaatcctagcactttgggaagctgaggagggcagatcacttgaggccaggagttggagaccagcctggccaacatggtgaaaccccatctctactaaaaatacaaaaattagcccggcctggtggtgggggcctgtgatcccagctacttgaacctgggaggcagaagttgcagtgagtcaagacagccactgcactccagcctgggtgacagagagagactccaactcaaaaaataaaaaagaaagaaaagtccaacctctcgatttttcccctttcccctctcaactaagaaatgattgtcgttatttgaattttacaatggaacaactaaatccaaatcacagaagcatagtcagatgaagaaacttgacgcccaaagaatttctgtgactctctgaagtctcaaaaccactgattcaacaacactagtttgtatacaaattataattcacatttgtactatattacataaaactgggccttaaacatataagtaatttttaaattactgaatataataactaattagttaattgatacacacaagcacattgagggaatacttggatttttagactgttgtcttgaaagaggataagtctcctttcttggaggtaagcatcccaaatttgcagaaaattatttgcaagttttcactcaataaacatgtataccatatgtgaattaactctgtgtagcagcataacatagtgattaacagcataaacacttagagccagactaggccatcagctccactacttctactctgcctcagtttcctgatctgtaaaacaggataataatagtatgtaacaaatgtaaagcatatgtaaggaacacactgggcacaaaataagcattaccaacatgtttgtcaagttggtggttctaaaaacgtggtcttcattcagaaaggctgtaggctttaaaaaaaaaaaaaggacaataaaatgtggtcctcagaccagcagcagcaacatctgagaatttgttagaaatgtaaaatttggaactcatcagagacctactaaatcagaaactctggggtagggctcagcaatctaggcttaaacaaaacatctttcaggtgattccaatgcccattaacgtttgggaaccattgctgcaaattaataagattttatctcttcctctctagactttagtgcatgtgtgtgtatatatattcattagtatacttggtgttttgcacatctcatcttttgtcataaaactactcaaacgtagtttcaacactgaaggtaacttcacacccactaggatgtttataataaaaaagatgacaaatgttggcaatgatgtggagaaattgaactctttatacactgctggtgggaatgtaaaatggtacagccactttggaaaacagtctgacagttcctcaaaaagttaaatatagtgtaaccatatgatccagcaattccactcctagacatatacccacaagaattggaaacaaagtcacacaaaatctcttctacacaaatgttcattgcagcattattcataatagaaaaaagtagaaacaacccaaatgcctataactgatgaatggacaaacaaaatacagtatatccatacaatggaatcttattcagccataaaaaggaatgaagtactgatacattcaacaatataagtgaaccttaaaaacatgccaagtggctgggcgcagtggctgatgcccataatcccaacactttggaaggccaaagtgggtggacccctcgaacccaggagttagacaccggtgtggacaacatggtgaaacctttcctctacaaaaaaatacaaaaattagctgggtgtggtggtgcgcacctatagtcccagctactgaggaggctgagacagaggttgcagtgagcagagatcatgccactgcactccagcctgagtgacagagtgagaccctgtcttaaaaaaaaaagaaaaaaaatgctaagtgaaaggaaccagtcacaaaagaccacatattgtatgattccatttatatgaaatggctagaagaggcaaatatagagagataggaagcagattagtggttgcctggggttgggggtgatgagaggaaaacaaggaggagggatggctaacaggtgcagagtttctttttttctctctctatttttcctcatttggatgaagaaagaaaaattcagttagctaaggatttaagtcaactaaatttcaattaattgaaatgttaggaaaattaagtgttttttatttatagatgttatagtattactaatagatgaactttttaaaaaattagaattttcagcacaaccttagaataacttcttattctgtactaattttagatttttgaaacatgaatgttaaatataaagttaattgttttaaattgtttagttaatgaccaccaaaaacaatacctccttttctatttgaactgtcttaaaactcagagttaaatttaaaccttagctgggaaaaggtctatttcaggttcttctaatatctacctcaggtataaaatttcttttgagggtgatgaaaatgttataaaatcaacagtgatggctgggcatggtggttcacgcctataatcccagtactttgggaggccaaggcgggaggattacttgaggttgggagttcaagaccagcctggccaacatggtgaaaccccatctgtactaaaaatacaaagatcagctgggtgtggtggtgcacgcctgtaatcccagctacccagctacgcaggaggctggggcacaagaatcgcttgaacccaggaggcagaggttgcagtgagctgagatcacgccacttcactccagcttgggtgacagagtgagactgtctcaaaaataaataaataaatacaatcaatagtgatggttgcacaactctgtgactacattaaaaaatttaattgtatactttaaacaggtgaattatatagtatgtaaattttacctcagtaaagctattatttaaaaagcctaaaggcacatgccaagatattattattgatggaaaatacatgtgatataacaatttatgcaataacaataatctatatttaaaactctaaattatattatcctggaagtcagggagggaagaacagggcaaaagtaaaggttctaaattattcacaaatatggggactgatgagacactcagatattgctttactgttgattagagcaaaaactaaaatataaccattgaaaacaaagtattaagaccaaaatgtaatatcctcaaaatcactagaataaagagactagaaggaattatgcttagatattaaccgtgataacctcagaactatggcattactaagtgattttatttcctttttgtgtttttattttccatgtcttttccaacgaatgattttatttttgtgtgagtctgcttatatttgtgaccctgacttttttaaaatccaattttacttacttgtgtattaacttacagttaaatttttagttaatatattcagataattcaaagttcaaaagacagaaaaagcatggtgaaaaacctccttgctaccagtacacctaacccccatctaccactactccaaccatggagtctacaactgtgatgggtttcttggatatttttggggaaatatgtcatgaatatacattgattattttccatctttttaatacagacacaatttaatatatgtacttcactttatatgctatattcaccttgcttttttttttttttttttttttggagactgccccatatcagtacctacagagcttcatctttcttttcaatggctacatagtattccactgtatggatgtaacataatttatttagccagcctcatactgaaatatcactttcttctttttttttttgagatggaatctcgctgtgctgaccaggctggaatgcaatggtgtgatctcagctcacagaacacttgacctcccaggatcaagcaatttttgtacctcagcctcctgagtagctgggattacaggcacgcgccacaacacccagcaaatttttttttttttgtatttttagtagagatggggtttcaccatcttggccaggctggtctcgaattccttacctcaaagaatctgcccacctcggcctcccaaaatgctacgattacaggcctgagacaccacatccagagacatattacttttataaccgacaagaacaacacaggaatgttaggggaaattttattcaaattctcttttttaatttttttcaacttcatatgctctggatcagtgtttattatttgaattttcttttttaaaaaggattattacccactaatttaaactcataggttctttttgacaataccaattggaatattgctgctttatgtatacatagactttgtggccagaacagaagatatacatctgggtggagcccacctcagcaccgcaaagccactgtagccagactgcctctcttgattcctccactctgggcagggcatttctaaaagaaaggcagcagccccagtgaggggcttatagataaaattcccatctccctgggacagaacacctgggggaaggggcacctgtgggcgcagctgcagcagacttaaacgttcctgcctgctggttctgagagacccccagcatagcactcgagctctgctaagggacagactgcctcctcaagtgggtccctgaccccagtgcctcttgactgggagacagctcccagaagggctcaacagacaccccacacaggagagctctgactggcatctggcaggtgcccctctgggatgaagcttccagaggaaggatcaggcaaaagtctttgctgttctgcattctctgccagtgatagccaggcaaacagggtctggagtggacctccagcaaataccagcagacctgcagcagaggggtctgactgttagaaggaaaactaacaaacagaaaggaatagcatcaacatcaacggaaacgacgtccacacagaaacccaatccgaaggtcaccaacatcaaagacaaaaggcagataaatccacaaagatgaggaaaaaccagtacaaaaatgctgaaaattccaaaaaccagaacacctcttctcctccaaaggatcacaactcctgatcagcatgggaacaaacctggatggagaatgagtttgatgaactgacagaagtaggtttcagaaggtcggtaataataaactcctccgagctaaaggaggatgttctaacccaatgtgaggaagctaagaaccctgaaaaaaggttagaggaattgctaactagaataaccagtttagagatgaacataaatgaatggatggagctgaaaaacagcacgaaaacttcatgaagcatacacaagtatcaatgcccaaactgacgaagcagaagaaaggatatcagacactgaagatcaacttaatgaaataaagcatgaagacaagattagagaaataagaatgaaaagaaatgaacaaagcctccaagaaatatgggactatgtgaaaataccaaacctacatttgatgggtgtacctgaaagtgatggggagaatggaaccaagttggaaaacacttcaggatattatccaggagaacttccccaacctagcaaggcaggccaacgttcaaattcgggaaatacagagaacaccacaaagatactcctcgagaagagcaaccccaagaaacataattttcagattcaccaaggttgaaatgaaggaaaaaatgttaagggcagccagagagaaaggctgggttacccacaaagggaagcccataagactaacagcagatctctctgcagaaaccctacaagccagaagagagtgggggccaatattcaacaatcttaaggaaaagaattttccacctagaatttcatatccagccaaactaagcttcacaagtgaaggagaaataaaatcctttacagagaagcaaatgctgagagattttgtcaccaccaggcctgccttacaagagatcctgaaggaagcactaaacatggaaaggaacaaccggtaccagccactgcaaaaacataccaaattgtaaagaccatcgacactatgaagaaactgcatcaactaatgggcaaaataaacagctaacatcataatgacaggatcaaattcacacataatattaaccttaaatgtaaatgagctaaatgccccagttaaaagacacagactggcaaattggataaagagtcaatacccacctgtattcaggagacccatctcacgtgcaaagacacacataggctcaaaataaagggatagaggaatatttaccaagcaaatggaaagcagaaaaaaagcaggggttgcaatccgagtctctgataaaacagatcttaaaccaacaaagatcaaaaaagacaaagaagggcattacataatggtaaaggaatcaatgcaacaagaagagctaactatcctaaatatatatatatatatatatcctaaatatatatgcacccaatacaggagcacccagattcataaagcaagttcttagagacctacaaagggacttagactcccacacaataatagtgggagactttaacaccccactgtcaatattagaaagatcaacaagacagaaaattaacaaggatattcaggacttgaactcagctctggatcaagccgacctaatggacatctacagaactctccaccccaaatcaacagaacatacattcttctcagtaccacattgcacttatcctaaaattggccacacaactggaagtaaaacactcctcagcaaaagcaaaagaacggaagtaaaaaccaacagtctttcagacccagtgcagtcaaattagaactcaggattaagaaactcactcaaaaccgcacaactacatggaaactgaacaacctgctcctgaatgactactgggtaaataacgaaattaagggaaaaataaataagttctttgaaaccaatgagaacaaagacacaatgtaccagaatctctgggacatagctaaagcagtgtttagagggaaatttatagcactaattgcccacaagagaaagcaggaaagatctaaaatcaacaccctaatatcacaattaaaagaactagagaagcaaaagcaagcaaactcaaaagctagcagaagacaagaaataactaagatgagagaagaactgaaggagacagagacatgaaaaacccttcaaaaaaattcaataaatccaggagctgattttttgaaaagatcaacaaaacagatagaccactagccagactaataaagaagaaaagagagaagaatcgaatagacacaataaaaaatgataaaggggatatcaccactgatcccacagaaatacaaactaccaccagagaatactacaaacacctctacataaataaactagaaaatctagaagaaatggataaattcctggacagctacatcctcccaagactaaaccaggaagaagccgaatccctgaatagatcaataacaagttctgaaattgaggcagtaattaatagcctaccaacaaaaagaagcccaggaccagacagattcacagccgaattctaccagagatacaaaggggagctggtaccattccttccgaaactattccaaatagaaaaagagcgactcctccctaactcactttatgggttcagcattatcctgataccaaaacctggcagagacacaacaaaaaaaagaaattttcaggccaatatccctgatgaacatctatgtgaaaatcctcaataaaatactagcaaaccaaatccagcagcacatgaaaaagcttattcaccacgatcaagtcagcttcatcctgggatgcaaggctggttcaacatacgcaaatcaataaatgtaatccatcgcatacacagaaccaatgacaaaacccatgtgattatctcaatagatgcagaaaaggccttcgataaaattcaacaccctttcatactaaaaactctcaataaattagatattgatggaatgtatctcaaaataataagagctatttatgacaaacccacagccagtatcatactgaatgggcaaaaaccggaagcatttcctttgaaatgcacaagacaaggataccctctctcaccactcctattcaacatagtattggaagttctggccagggcaatcaggcaagagaaagaaataaagggtattcaattaggaaatgaggaagtcagattgtctctgtttgcagacaacatgattgcatattttgaaaacaccaacatctcagcccaaaatctccttaagctgataagcaacttcagcaaagtctcagaacacaaactcaatgtacaaaaatcacaagcattcctatacaccaataatagacagagagccaaatcatgagtgaactcccatccacaattgctacaaagagaataaaatacccaggaatacaacttagaattgatgtgaaggacctcttcaaggagaactacaaaccactgctcaaggaaataagagaggacacaaataaatggaaaaacattccatgcttatgaataggcagaatcaatattgtgaaaatggccacactgcccaagttaatttatagattcaatgctatccccatcaagctaccattgactttcttcacaaattagaaaaaactacttcgtttcatatggaaacaaaaaagagcccatataccccagacaatcctaagcaaaaagaacaaagctggaggcatcacaatacctcacttcaaactaagctacaaggctacagtaaccaaaacagcatggtactggtaccaaaacagacatatagaccaacagaacagaacagaggcttctgaaataatatcacacatctacaactatctgatctttgacgaacctgacacaaacaagcaacggggaaaggattccttatttactaaatggctttgggaaaactggctagccacatgcagaaaactgaaactggaccccttccttacactttatacaaaaattaactcaaggtggattaaagacttacatgtaagacctaaaaccataaaaaccctagatgaaaacctaggcaataccatacagaacataagcacaggcaaagacttaatgactaaaacaccaaaaacaatggcaacaaaagccaaaactgacaaataggatctaattaaactaaagagcttctgcacagcaaaagaaactatcattgcagtgaacaggcaacctacagaatgggagaaaaatttttgcaatctatccatctgacaaagtgctaatatccagaatctgcacagaacttaaaacaaatttacaagaaaaaaacaaccccatcaaaaagtgggtgaaggatatgaacagacacttctcaaaagaagacacttatgcagccaacaaacatgagaaaaagctcaccatcactagtcattagagaaatgcaaatcaaaactacaatcatctcacaccagttagaagggcaatcattaaaaagtcaagaaacaacagatgctggatagaatgtggagaaataggaacgcttttacactgttggtgagaatgtgaattagttcaaccattgtggaagacagtgtgacaattcctcaaggatctagaacaagaaatgccatttggcccagaaatcccattactgggtatacacccaaaggattataaatcattgtactttaaagacagatgcacatgtatgtttattggagcactgttcacaatagcaaagacttggaaccaacccaaatacccatcaatgatagactggataaagaaaatgtggcacatatacaccatggaatactatgcagtcataaaaaaggatgagttcaggtcctttgcagggacatggataaagctggaaaccatgagtctcagcaaaccatcacaagaatagaaaaaccaaacacgacatgttcccactcataagcggcagttgaacaatgagaacacatggacacagggaggggaatatcacataccggggcctgttgggggtggggggctaggggagggatagcattatgagaaatacctaatgcagatgatgggttgatgggtgcagcaaaccatcatggcacgtatatacctatgtaacaaaccttcatgttctgcacatgtatcccagaacttaaagtataaaaaaaaaaaaaaaaaaaagggccaggcacggtggctcacgtctgtaatcccagcactttgggaggccgaggcgggtggatcacagggtcaggagagcgagaccatcctggataatacggtgaaaccccatctctactaaaaatacaaaaaaattagccgggcatggtggcaggcacctgtagtcccagctactcaggaggctgaggcaggagaatggcatgaacctggaaggcagagcctgcagtgacccaagatcgtgccactgcactctagcctgggtgacagagcgagactttgtctcaaaaaaaaaaaaaaaaaaagaagatatacatcaacaacaattttattgaagcaattttaagcaatacatttttcatttcccttttcattcctttttcatttaagttcctaggtatgtgtaaaataatcaagttaatatttatagtgccacattttaaatcacagtagcactctgacaaatctgcctgcccaatggacagaatgggagttacccaatcatcaaccatcatcaaccacaaatatgtatttatttataccttgttttcaagattctgtgttagaccctagagttgcatttatattatgcctttaaaatcagcttctaaatgggcttcatctcatagtccaccacagtggaataatgcatttttcacattttttccctttgcttcaatgacactaacctctccttcttctagttctatgtctaccttctaacctcaggctcttcttcctcattctatccttaaatcttctccttcttgttcttttccaagtatctctcttctaggcactcactaggtaagcttagttactctccttgttgacccaccacctctagatgggtgatttctaagtttattgctctctcctaactttgaagcccatatttttaacagttccacttggtgtcctactaatactttaacatgtctaaaatcaaagtcatcctaccacataaacttgctcctctctaacctcaccgattcatatattaaaacaacaaatatctattgagtgatagtttatatgtcatggtgctaagcttagatcctacccaaaagcagctgagagtctagaacagtcaacaagactagtatctttgttcaatacctttattatagcacttatttttgttgtggtgggctaatcaagataagttaaagataatagtagaaaataagactggaatggattattgagatcagaatatcgaccttattctgacctcaagaactgaattcttattttaattataggcttaattctatcaacttaattctgtataaaatggggagctccaagaagtttttgagcagtagaatctctacattccattttcagaggctgaatctgcctagaatgcataaaatgaatttaaatggagaagtattagaaaacaggtcacacagatctatggaagagattatcttaatctgaacccatatagtgagagagttaaactcaaggcttttcacagcccggctttgatcagcctatagaattttgtctcagaatacaatacttttaggcttatcaggtttcagcacactggacactaaccatcactgaatatatgccccatcctgcccaaactgttttttcaaggcctagctcaaaaacttttgggaaataattttccaatttccctcagccaaaatgaactgttctacagcattttatttgtaatttactgatgccatttaatcattctcctgccaagctgtaaactctttgcagtaaaggattatgcattattcactctggttttcctcaaacttggcacacttcctgacatatatgaagcatcttatttaatgttgggttatattggcacagtggaaagtgcactggcttttggaattagacttaaggactgaatcattcactagctacattattttaagcaagtatttaacttttcttaagtttaattacctataaaattccctacttcttgcaaattattgtgaaactttgaggtcaattgtaaaaatcacctataaaaagcacctagcaaagtatatggtacatggtgggtatttaataaatggtaactgtaattaaggccctaggaatttttttttttagtctcaagtgaaacagcagattttttgtacacagcataatcttcaaagcctttatttcctcttcagttttaactatggtcaatcatgactatccctggttgagagcacgtactcgacaaacatctgtgactgcccactacatgctaaatgttgggaaaatttaaaaaaatgtaaagttctcagtgacagggcctcctctccttgtctttactacccaagaaagaagaacattgctgagtttctaggcctcatataagataccactctggtactatataatttcatccttcctatattaattcagaaacatttattaactaccgtgtggcaggcattgcgccagaaacaaaaatgcagatgcaacagtcccaattctgaaggaggtatttcattgtttcactcatgatagtgtatctttgtttttacaatacaagaaagaggagcattactgagtttctgtggcatatatgcattctattacactgtataatttcatccttacctatagccttctgtatatgaaactgagtaaaatctgataaaatgtcccagtctttagtatttcctatgttactttttcgtttgtgatcttgtttcacagtaacttgaagatttaccatccaggtgccaacaattctggtgaagaaataaaagacatgttgctagctcattaaagttttctggactttcaccaactagtaaaattaaaattatatagtaactactattcttattgacaatcctttcttatttcagaaatcttttagcagtctaaagtacctattcagccatcttatttgttttggtaatatagctaatagttctaaatcaccatttgtcaaacccattagaggtgaactgtagtcgaaactgcaaaactctgtaacttaaatgtaatttcattgtaactaatagaacctaagtagaattatgtagtagtgaaaatattttaattctagcaaaaagcaatcaaccacttcctaaaacaatgtttcttttttttctcttgggtttactctcctcctcctttatgatttattcttaccacagaaccattaagatgttctttgtttggttatacttataaaatgtaaccctgacatctctttttctattatagtacttactattatgctatttttctgcttccaaaataagggagaatttgaatctatgactgcataaatttaaaaactaccttccactggtcacagttcagtgaggatctgaaatctaggtaagtaatatttgtacacaggcagtgaaactagagcaattgctgagttcaaaagctaatagctaagcattgtttcacagactgctctcagttctgaaacagcagatatgtattatccataccacttattatttatttatttatttatttagagaccgagtctcgttctgtcacccaggctggagtgcagtggcgccatcttgggtcgctgaaacctccgcctcccgggttcaagcgattctcctgcctcagcctcccgagtagctgggattagaggcatgtgccatcatgccaggctaatttttgtatttttagtagagacgtggtttcaccatgttgatcaggctggtctcgaactcctgacctcgtgatccacccgcctcagcctcccaaaatgctggggattacaggcctgagccatggcgccaggcctaatttttgcttaaaaaaaaaaaaaatcacatttgtattcaaggtgagaaagcttcagaattattaaggacaaggattctgacagaaagttaagttcagacctggttacaaattcagacaccttaataaagtaggagatagtcttcagtatctgaacaataaatagctttaaatgcagggctttttgagtagaggagtgatcacttgaatctggagagagggcgagaaatggggagggattgctaacgggcattggggttccttttggagtggtgaaacttcttggaatcagaggtgacagctgcacacgattgtgaatgtactaagtgacagtggattgtacactttttaaaaaatggttaattttatatgtgaatttaacctcaataattactttttttaaaaaagaaaaaaaatagaggcttttgtggcagggatggactttgcttggtgaaggcccctactgtaacggtgcccagacatccacagcgaggtcagtgaggagcactcccacctcacacaaagccatatgaaaacttaacagatttccctcagctaaatccccgttttcaacaaccgccaattagccaacatttaacaacatactgaactcatttctgtatgggaaaacagcgaaatattcatgaaaacatttagaaagcagcatcaccgaccacctagaaatcccctgcgcgcaatagagaacaccagggtggaaatggtagaagccatttttggttaaggtttttgtcctgggtggagggtattcgtgaggattcagtcagcctcaaacattacatttaaacataggtgcctagctacgatgatacatttgccagtagggcagcgttgcacggtgaaaggcaaaaacccctctaagcctcctcctgtggcgacaaagctctcggccaacgctcaccgccatacacatccgcgggaacgcttcctccaccagccgaaggcggggcctctgagggcactcccgccacacagcgcgaattgagcctcggggcttcctgggaattgtagttttagtcacggacacatcttttttattcgggccagtatgcaatgaatcagaaaactacaactcccaaagtgccccggggcggcgaggggccgcaacggtgacgactgtggcagagaaggcccggaggggctctgcgttctgtagtggcgctgcttgggcccttggcggattgtaagctgctggttttgcggctgggaagagcggcgagagggttcggcatttttcgtcgggatccccgcaaggatgagtgctgccagagagtctcacccgcatggggtgaagcgttcagcctccccagacgacgatgtaaataataatggcggagtggctgagggttgaggcctactaaagcctggagtaggccgggaagggtggttggaggaggacgcgcctgaggtggcctgcagcgggagagcccagggaagaaaccagaagaatgagtgggaaatgcctcccttaatctttatgagggtcagaaggtttgaagaggcccacacgctgagagccggagacctgcgtaggaagggggattgaggaaggaaattctgagagggtcgaggagtgaaagagcttagtcaagggatttcgtacgtgcgttttggggggccgatgagagtgctttctcgggcctttgtactcagtatagagacggcaagactctccctgttttgggttctaaatgttcccgtgacaatgtcgaaatgttcgtgcacgtttgtacagatttttcctgcctggatgatttttacaatgtgctgttgagagttaactttagctgcactagtaagggtaaaccgagaacagtattgagccgaaaattgtgccacgggtgtaatttggtactggctctggtggtgaggtctaagacgttgagacctagaagcccattttgatgtcggatattaatacctcgttcttcttacctcgtctccccatcaaatgccgttcccttcctcagccctcacctcataggttttaatagcaaacggtttatcccttaaagtaacccgttaaatatttactgcactgccgggtgttgggaattcggagagaaatatgatgcttattttaggcctttttgtatatttgtcctagctcctagcccagtgtcatggaaacggtaggtaaccagtaaacgtaaaactaggtccttcatacaatggataagtgtcttggcaacgttgatggggaaaattgttggagagagcgcggagaggtcatctttaaggaagatgaagggatatctaggttttttttcggttttgtttaaagtactgtcaatttctgaatacatagagctttaaatttttcgatagtgcatttcaacgctcttcataaaattttaaaagcccactgaatactactttgtagcaaatgagataatgttaagacctacccctctgatgggaggtggggcgaggaccggaatattaaggatctttaaaggaatcgacttcagctctgcagaaagattagcaatcagtaaagatttggggatgaatgggcacctagagaagtttattcttgctctctgttatttctgctactggattttagatcttgttaatatggtaattcaggttttgtcaggaattgatccacactttt

SEQ ID NO: 577 - DNA, 345830 bp, Homo sapiens
  source 1..345830: mol_type = genomic DNA
tggcctgtggccattgatttttaattgaccaggttggctaaaagtttatcaattttcagagagcaagcttttgattccattgacttttgagtgtgtccgttttctgtttcattgatttccactgttacctttattatttctttccttctacttactttgggtttatatcattatgagatgatcttgtttatctctagcaccacttttttcttaaaatctctttgtggtaatgcagctacttcagctttctgatgctttcttatgtttccatggtatgcgttttttcattcttttactttcgactcatttgtacttttgcatttaaatagcatcttttgtagacagcacatacgttcttgtttttattaatatattccacctgctaatctctgtcttttggttcgactgtttcatctatttatatttacttttttttcagggatggagtttctctgttgcccaggctggagtgctgttcacaggtctcctaacattctctatttgtctttttttgtttgtttttgagacagggtctcattttgtggagtgcagtggtacagtcacagctcgctgcaacctcaacctcctgggctcaagcgatcttccctcctcaaccactggagcagctggagtacaagcatgcagcaccacacccaactaattaaaaaaatttttttttttggtagagatggcggtcttgctatgtctcccagctgctcttgaactcctggcctcaccttggcctcccaaaatgctgggattataggcatgaggcaccatgccagccctctgtttttcaattgaatactttctattggtctatcttcaagttcaccaatgaattctgtcacctacattctgctactgagcccacatagtgatcttttatatattgttactttctaatttcctttgtatctaatagtttaacaattgattatcttgggatataattatatcatcttccagtcatgataattttaccacctgctatggtttgaatgtatctgctaaagttcacgtgttggaaacttgattcccacttcagtcaggatctctttgaaattaagaagtgtgtgtgtgagtgtgtgtgtgtgtgtgtgtgtgtccttgctgcctgagggtggaggaagaaattgtgaacaggaatcctgtatttgcttgtctgtgtcaggggaaaagaattataccccaattcttttccgctgatcctcaagcctgggaaattttaaaggagatgggaaacgaccccgccttcttatgaatatgcaacagtaaggggttgggagaagggagagaaaaggcctgcaagaaattcaccccaggtcctcctgctccgggctcagcccgggccccccaccgtcctacccacgaagaacagcaaacaatagcacagccccggccctggaagccgagctagccgcagagggtgatgcggaactgctcatcgccagggaaacgcggcattcggacagccgtccagagcctgtctgagttctgctgggcggggagccagagactgattcgctgcggtcctgggcccagcggctgggaggtcccgccctggccgaggaaatgaagagggcgcagggcatgggggcggcgcgcacccgggacagtttccagtcggcttctccgtgaccttcctcccccttccagctcggagcgggatgctgggatccctccaaggaccctctgaggacgtaggagggatgctgagacaggcaagtgggatttctctacatattgtcacctcgcccgcacttttggagaaggtagagccaagcagcatttggccgaaatcctgtgcccgtggaacatttttttcctgaagtggggggtgaaagttgatgatcagcggctccgggtaggagaagggatagagctataggtgcggtgaggttagagaagttgtcatggccgagcttgcagtgagccgagatcgcgccactccatcctcggcgacagagcgagactccgtctcaaaaaaaaaagaagaaaagaaaagttgccgcggccccagcaggctcaaggggtgagcgcataggggcgccggggcagtagttgcacaaagccagcctggcggtcgcgttgccatggcagcgggggaggggccgagccgcagcgtggctgtgttgccgggcgacggaggagccgcgggggaggccgaaatctcccggtgctcagcgtcactgcgtgagcccccactctgatgcttcgttggtgtgtgtgtctgtcggtgtcaatccacagtccgctggcagcctctgtcacttggttagggaataaactatcacctacttaataccttaatgctctgcttttgaaaatatttggattgtggtgttatggaagacatgaacaagaatagtactcctacttaacgaagttttgttttgttttgttcgttttgagacagtcttactttgtcgcccaggttggagggcagtggcggatcttagctcactgaaacctctgcctcccgggttcaagcgattctcctgcctcaccctcccgagtagctgggattacaggcggccgtcgctacacaaggctaatttttgtatttttaatagagaaagggtttcaccataatggccaggctggtctcaaactcctgacctcaggtgatccgcccgcctcggcctccctaagtgctgggattagaagcttgagccactgcgcctggccaacaaagttttttaaaaaatacgttgtatttcctcgtttttaaggtagcatctactgatgggagttccttaattatcatttaaaaagtaaagtacagaaccagatttggatccacgaaacgaattgttcctcagcttttcaaacatactaaccaaaaacatttgcaaaagaaaaatatataaagccggtagcagtactaaatattaggcccagcactaaaaatgcagacagttctactgttggaaagatggcgactttcacaaaggactagagagcatcagcctcattttatttctatgggtattttcatacatggagatgtgctaggtgattttgtcttactatgtcaaagattacttgttttagccatataccataggaaaaaaaaaatgtcaaggggttcgaatgatcttttttagagcagtttttttgtagctacaatagtacttctattttacaaattatgttatttgtttactcagatactcattcatcaaacatttactgaggctctactatgtgctgtgtacagtgctagacttgagagcagagagataagtggtgagaagaacatacaaaactgaattagaaaaattcacagtttcgggagccggaaatgctaggaagcagttgtaaaccactgtggtacattctcattgtgagatgccaccaggacagcccctgctactggccagggcctcaggtacacagaccacagctgagcttggaacttcatttgcgttgtgggttttgctctttcaaggcaggcatttttggacccatttaaaatagaaggagtccagcactcagagaagtgcggtgataagcctcatgtctcacggccagtcaggctcaagatccaaaagccactgctatgacatatattttggaacattcgccctttgatcattaaatcctcactacctgaatgactatattttttgatcattcataatggtaagtgaatttcttaaaaacaataactgtgatgcaattttctttttggttgagatctgaagtcacgtatttctaaaatcagataccaattgcattctgaagatgtgttcttccaactggaatgttgtcattgtcaataatactttttccaggggttcctgggaagtaaatgagaaaatttaaatttggttattcatgattttaaaacatgtaaagatgtgtgtgttttaaagtactgtgtttaataaatcgctatagcattagatttgtttaaagcaaaatacactagttatcatttaagtttttattaactttttaaattttttgtcagatttcttactttccacttgcagccacattagagaggtcataggaaaaatttctacctagaaagttcaggtatggacctggctggtcctgcatgaagactttgctatgcattttccactgcagcctgggaaacctctttgaactaattttataagctattttactgttaaaattttattttttcaaatagattgcagaatccctgaaggcaaggaccaggtcttctgtgtctttagaattctcttcataatactaaatacaacactcttcataaatattaactggcagaaaaagcaaaaataaactttaccggactgatgaaaactagagtagaactaatacttttatagatactatcctgagtcacagaagttttgcttatttgctgatttttttttcattaaactctactgtgaaatgctagggagtacctatttcataggtagaaaaactgagttgtagtgattagcatatgaaatatttttcaatgcattatcttcattgagccttacaacaaccactcaggaattcacatcaccattttttaaatatgtgagaaaacagaagctcagagaagttgaacgagtcagacagggtcacccagaaaggaagaggtgcatcttctgaccgtgtcacatgatttttattctgccattgcaaaccaggtacacgtgtgagcttcgggaggctgggtctcccaccagccctggagtgctaggtgcaagatcccttctctccctcacctcctcaaggctgctctgccgtctgggaagaaggtgagagaaactctttcaaaagacaaaggggcagggccagtgaaaggaggagctggagaggggctccctggagcaaaatgaagtgagattgagaaggaagagtcaagtgaagttgatcgaaaaccagccactgttcaaaaatgggagtgaggggttgggagagagtgtctttgttcgggctgccatcacaaaacaccacagcctgggggcttaagtgacagaccttgattgtcccagtgctgggggctggtagtccgagatcaaggagtctgcagggatggttttttctgacgccgcgctccttggctcacaaacaactgccttcttactgcgtcttcacgtggtcatccttctatattgtctgtgtcctaatctctgcttataaggacaccagtcatactggattagagcccacccatatgacctcattatacctcaattaccgctatgaaggccctatctccaaacacagtcccattctgaggtactggagtcaggacttcatcctgtgaattttgagcccagagcagagaatttttaaaaagtggacactgatctgtgactttgaagacaaaacctgttgacctgtttcaattgctttgttattctcattagtattttctcttagcacaaataaatggttgagcaaatagtggccatttatttttacactagtatattctgttggttgttttttttttttaaaaaacatccagaactgaattctatatctagcttgcttcataatttattttcactctcatctctgcagggccagcttcaaaccttgtcaagctctgacaagggaagatgaagcctagttccagctaggggtgacctgtctatctgcattttttgagctgcagagtgatgggagtcatattcgctgcctgtgcagcaccacaggcctgatgaaaatgaaatggcaacaccgtgcagatggcaaagcgtaggcctcacaaacatcctggccgtgaaggtaagttgagcaactttctgcctgcatggcattatccatgcttatttctaacaagatacctatggcagagtatttcaggctgtttgtgaagggcagccagtagaatttgaaggttttcactgaggcattgagcaactaacaagggtgtaattggaacgtgtggcaagaactccaattgttaaaatatgtggtcataaaatgatagggtctagggcgaagcctgcaggtcttgtggtcagtatcttgcccttggctggactacatagtgtctgttttgtaaaggtagaaatcaatactgtgtttcaagtcagctaaagaagaaggttccagagtcttctgccacagaagtttcggtattcaccagtcatcagagtctcaaagtacttgtgtttgtctccttaacttccttcattactttatattctgccttcaaagggagggagagtagtcttctattttatccatcatttgctgaaagaattatatgaggttgcttcttggctcttctctgtaagttgaatagaaaccgtgtgcattgttctaggaatctgtttctatcatggccccgcgcagcacctgtccttcccaccgtgagtggtggagctgtggtctgtgtcatcctcgcatttccaaccccagtcatacccctttacttttaagtgtgaggccccggatgaaattctgcagtatccctgctgaagagcagggctccaatgcacctggtggagcttttccaaggaacacggaaagtgttcggaatgcactgcttggacaagatccagcagctttccttgatcggtgctttcagaaacaggttcttgtgtagaacagctacgggtatcccagccaaaaaagactgcctatttctgagagctgtgcatacttaattagaacagggattggtgccagcacttggagtttgaaaagtcagctttgaacatgaatgcaagtccctgcaaggtagaatggtctgtttctccttatttgagccagaaatctgtgtaaccggccggcgtgcacatcacatggcacagattcaggaggtgagctggtctcttcagttgctgcttttatagcagcttttaatcaaaatgctcacctcagacgcaccctcctcaaattaaggaacagaataaccaaacacagatgtgtaaagagtgagggaaaacagttgttctggctgttgatgacttcctcaggcgtgggcatagtgaaatgccctttcttcccgtctgctaccgaagatggcaatgacgttgagtggcttggaaattcaaaccactcaacaagtattgaccagtcactccctgtatactcagtgctgacaggggcatgaaatgtgtcacgacctttcttcctgagtagtttatgatcctgctgagggtgagcacacacagggaatcatgggaaaggttgtgtcatggcgtggccaccccaggaacggctgatgtgggggctcagtggccagaggcccagatcctcccctgctgtggcttctttcctcttacctgggtctcctgcatgttcacatcaccccatccccaatccaggctctgtcccatttttcagctcagggtcttcctccagtccggtgagagtggttcaggaaatcctagctctggttgtgtctgccccagtgtgagtctggctgtggggtttcaagccttatcttcctggaggaatttcatcagggtctgaaggaaatataagagggactgggctgaagaagaggaagagaaggctgtctttcttcattattgatagtagtcgtaaatcattggaaagtcctaaaagactgcctgagtgttcatttccaggacagaaggatacacaggcaacataagaatataagactgtgttgagggcaacagcagggcaaaggagaaaagtgctggtcacaaccctagatggtgactgaagagaggacaacagccagcggtccatacgctgagacggatgggagaagagacacacagggacgaggaagccagcctgggtactaagtatcccctggattagctgcaagtgcgcttctcctcacccgcggacctcagctcttcccttcatgatatcagcagtgatctggagctggaggagtccccagggagaagggagtgcagctgtcgctcattccacccttcctggcatttcaagttggaataataaatgcagttctggtgtgttaggtttgcaagtgtttttagcataccatggtctcgcatgtacacattaggtatttcggctcgcccagggacctagtcattgtataacctctttctaaggaaactatatgccaaattccaaacaagcaaaatgttatttttcttgtgcaaagcctttgtatcttgaaaattggggcatctaagaattttatttagataacaagacagagatcagaatgggccagaggagcgtcaggagacctgggtgcaagtcttgcataaatgcttatcgagccaaattcccagagatttacatgtgttatctgcaggaagagggttttgattagtttttaaggtcccttctgctccttctaaaaaccagcctaaaatggaacatgtcttctctaagaatcccaaatgcctctcaaggatcaaccccttggccttttatccaggagtcccctagtgtctctaggaagctgcaaggatgatggtatctccatttttacacacaaggttgggaaagtctgcctgggaaaatgtttagaggtgtggatttctcacctttaatttatctttttggtttgctcctttgtgagatagcattgtcttcagctgctcttggctatgatgtcttagctgtaagatcttagccttgagaaagagcatcggggccatacagcagtcatttggccacaggaatttcagtcacgtcaggctgtttttgctgttgtattccatctcagacccagatgtctgcagtttcctcagattggaaacatcatgggatctcgttgtgcaaggagttcagcatattgagagtgaagcacaatcacctaccattttacattatgggaaatttgacaagtttcaaatcttgttattttagaggtgaatggatatatctgtgtgtgtgtgtgtgtgtgtgtgtgtgtgtgtgtgtgttactactccacatggggcaggcctaccccataggcagtggattgatattttaaatgaactagaggattgaaacctacactgaacctgttagtaaaatgagacattcatttataatgaaagcagatctcttagtttatgggatggataatcttggggtcttatttagcaggttttctttcagtggttgtgtctctatttagatagctaatgtggtatttcagaaaatattttcatggctagctattagaatatgtctatgaccgggaaatgaggagccacactgcttgtaaaatacttacattttcagtggataaaagatagcttgaataatgtaaaaatcaatagttcccatgatggtggagttatattctttggagaaaagtttaagtacttctaaggttaaatattatgttcattactcttagctctgggaatctgccaaaattatttttgcagccttgtttatatttagccaacataggcagtcagccactgaattaagcatttttttctccaaaagacctgattttgccaataagaatttggttatgcaattatgtgttgactaattagaaggtaaaagccccggatttgaaaagtttggtgttttatttaccatttttaagtgtgcagttcagcggcattcagcacattcacattattgtgcaaccttcacctccatccatctgcagaactctttttattttacacaattggaattcccactcccctctccaacccctggcaaccaccattctactttctgtctctatgaatttggctactctaggtacctcttacaagcggattctatagtatttgccctttagtatctggcttatttcacataacgcaacgttcttaaggcccaggtatgttgtggcatatgtcagaattttgtttctctttttttttttttttgagacagagcctcactctgtcacccaggctggagtgcagtggcactgtcacagtttactgcaacctgtgtctgctgagttcaggcaattctcctgcctcagcctcctgagtagctgggattacaggcacctaccaccacgtctggttaatttttgtgttttttagtagagacggggtttcactgtgttggccaggctggtcttgaactcctgacccctcaggtgatctgcctgccttggcctcctgaagtgctgggattacaggcgtgagccactgcgcccagccaattttgttcctttttaaggctgagtaatattccataatgtgtatataccacattttgtttattcattcacctgctgatggaaatttgggtggtcttcactgttttaaatcttttcagtggtattctggcctcatggtattctgtgctatggtgataacatattacataaaccagttctctgtggataggctttcagttttttccatgcttctatgaataactgtgaacttaaaccatttcacacatgtgcaagcatgttggtcaatcagaattattgatattgatttgctgagaagaacgttttgggcacattaaattttggatgctgatgaatttccttctgtggagattgtaccaattcatgtgtcctttataaagaatctgtctcccaagccctcaccaacgaagcaaaaaattccttcatctttgctcatctcatgatggaaaatggtgtctcagtgtggttttagtttacatttctcctattttgaatgaactctgaatgtttcagggacattgtatttcttttactgcaactatctgttcatttcctttgttcatttgtcagtcgggctgttgggtttttctcccccctcttctttatattggctgttgttgaaaaatgtccttttgtttggcatccctagtgtgcagcctgtgggagtctttgggggctctcctatgaaacaggagctttgtctgagaattagtaaaacctgcttttcaacaccattgatcaaatactggctcggtgacagtaggttttattaaggggagagtccagtgcagtagtccatttactgaaatggttcatatgctgaagaaagaatatctttgtgagaaagttataaaaatttctagtctcacaatgtgttttaatgttaagatttacttggctgggcgcggtggctcatgcctgtaatcccagcactttgggaggccgaggcaggtggatcatgaggtcaggatttcgagactagcctgaccaacatggtgaaaccccgtctctactaaaaatacaaaaagtagccaggagtagtagcatgcgcctgtagtcccagctactcaggaggctgaggaaggagaattgcttcaacctgggaggtagaggttgcaatgagccgagatcacgccactgcactccagcctgggtgacagagtgagatttcatctcaaaaaaaaaaaagatttactcaagttatcttttaaaagttgaatacataaacgtaagtagcttggtatgaactgaaaaaaacaacccaaaatagcgtattattaaatatcatttgctaagctcatgcagctaactgcatactggaaaactcaaactcaacatgccccactctgaactcatccctctgacccacagagtaacgtcccagttcctgagtttgctgtcttgcttctccacatacctatctactcttttctgtattattctctacattattgccatgggcggaaagtttgtgtccccctaaaattctatgctgaaatctaacccccaatgtgatggtatcagaagtgaggccttgggaagtgattagatcatgaggacagaagcctgatgaacagggttggtgccctcagaaaagaggccccagagagctgtcttgccacttccactatgtgaggatgcagtgagatggtaccatctgtgagccagaaagtgggcacccaccagacattgaatctgtggatactttgatctttgacttcccagcctccagaactgtcagagataaatatctgttgtttataagccacccaggttatggtattttgttacagcagcccaaacagagtaagacaactgccaaccagttccacctaaacagtctctccagtgtccagtgtgtccaccaccctgcacctggtcaccaccatcttgttgagatgccacccaatccctgctggattccctcagccacctccagctgtgttgttgccttcagacttttccacattcagcagttttatgatctgtcaccaagaggagtttatgaaatgcaactctctggttttgtaaaaccatatccctggccaaaaccctttgatggccaccactcccccagaataaagctcaaacttattagcatggcctctggactggcatgccctggctcactccctctgtttccttgctcattgccccctccttcctacactccactgttcccaatagtgatttctcaattccttaaactcagggtgctcccttgtttcagcacctttgaatctgctcctttttctggaatgttctcccttgttccacttcccagtcttcaccaacctgagcagctctattccttcttcctctagcaagtcttgcccaacactccccagcctggtttagtggattcttctcagatccagcatgtcccttagcttgcaaattgccctatgctataattgtctacttccttgtataaaagggtgcaccccacgaagctgtaaatgcccagggagcaggatcacatctaccttgtttcccgtgatcacccagaacctaacatattgattgctcataaacatctgttgatggatgactgttgacagatggctggagaactaaaggagaatgccttctggaaatgggatgtgactgggtgccagtggcttgtgatagtatcacacattcagagtcttgggatgagaccctgagtgtcttccccacaaatcctgaaacctgtgtggcaagaagagaaagctgagttggctgaagttttatttgcctggtgtacccctggccttgtgagaaagacagtgaaagaagatgaagcccgctcaaggttaagatcaggcagaggagaaacagacacctgcttaactgtcctggcagagtcccaggcagggcggcagctccctgagtggagaaggggcacacaaacttaaggcagagatcctggtcagggctggtgaggaagggatggattcggaatgcagcatcactcaaattgccttcaagggcagcccgtctaagaacctgtgctgtcttttctttgtaatacattcgtgtccctctctgagatgtaagtgtggtttggggctgattcagggcaataaatcctgtgtttgcagaatgtagtcactgatttgggacttagggtctaatcagtatgcagtccagtaaaaatagcaaaggtcatattttactgcactctgtctgaagtaagcaaactttcagctgaagacactctcagatgacttcttttcttgctcctcttttctccttgaaaatttacagggaatgttgtggtcataaggaacttctccctcactgggcttcatgctgcaaagttagcgagccccggcccgcagtgtccagctgtctttgctattactgccttcttttctccaatgcattgataagactcatgttcatagcaagtccagcaccgtgcatattgtgcacatttgtgaaaaattgttcaagaagtaaatatacttctcagcccctaacaccaagaggacaacagagtaatcatcccacagtgaccttcatttgtagacaatcagattagggagactctgagttgggggcaggtgggctggggttgggaggtgggtgagtgggttgctttctgtattgtttctgagaagaaaaatcttccatgccaagcagtggtgaatgagactgttcactcaggctttggtatagtgcaatgtggaaagccaccccaaatgggaagaggacacggtgatgaagatcatggggttattgtaatgattggcactgccattgttgagtggttactacaagccaagccctctgctaaatatttcacatggattattttatgtaaccctcacaaaacctaggaagtgagttagaatagtgaggcccatttgcagtgagatttctgagatccagaaccaccctccctgacactcctcaagtctgggttcttggtagaaagtggagaactgcagtccaaccatgtgctgtcaacccagggacctgctgcctccatcagtgtccaggaggtctgagtctagctttgttcctaatagctgtgtgaccttgtgtacttaggtctctgtgcttcagagcagcatgaggtatataaggttgttgtgaaaattatataaaataaggcatgtattagttagggtgatactaagtcctgtagtaaagcccaacattttggtggcttgccacaataaaaatttaccgcctggatacagaccattgcaggtgtgtctgatcggtggcaggtgctggtggtggtggatggctctgctccacgaagtcttcagggatctaggctaatgaaggctttgtatctttgatgtgtgatttccaggaccattacacccacagaccagagaagaatgttggcaggggtagtcccatgtatgatgaggtctgaagggtcaatttccgggactctctttaagaaatgaacacaaagtggtccatgtgctacagcccctccctgagcttgaaaggggccctgcaggagagggatcctgcaagcctaggattcattagcttcctggcaaactcacatccatagttggatggaacttggggacatggccacgtttggctccacaatgctgggaaacactgtctagactgtccgaaatagatgactgctggcagctgctgccatgtgtgtaaagtgcttctaacagtgcctggcacggcaagagctaagaagtgtcagctactattcttctgtttacaatgcagcatgggaatttccatcaagccagctgtgccctgagagctgcctgtcatattttcaccaacatgctctgggcatcatattatgtgcctgggctcggtccaggctgctgtgctttcagaaaagcctggaagcatcagcagagatgggtttaaaagtccacagtctaagtcgctacataaggagcaatgaacctgctgtggcgaaggtcgtggacagagtgtcccaaggcttggcccactgtggcagctggggttcctaagcctggcactttgcaactgcagaatcacagctgctgcctcagagcatcgctgatcagcccagttacatctgtagtccaaggcagtggctttcaactgtttcttttccatagaccatgacattttaattaatggttttagttgatctgccactaactagtgtgtgactgaagtaagtggtgttaaagtgctgttcttcctagcagtgtactacccacatcatcaaacatatttcccttgtctgcacatttacggcaataaggcttctctgcaaataagagaaagcatgcacctctcagaagagtgatgttgtttcacagatgtcaaatgcttgatgccagtttctgccaaggacgttctcggcccagcacctgataccatgtgcatgtggcctgtccatgccccagcccttcccacagacccctgcgtgacattgttggaccatggattcaaacccacaggctaggataagtgagaatttacctaggaaagcccatcctttggctagagggagaggaagcatccaggcttgctttttaaggggatctctaggtactttcccataaaactccccatccagctgtaaaccacccctgctcacagcaggcagtatttatgcaggctgagggtgaggtcattgcatattccaacaacagatttgtctgggaaattaaatttgcttatgttcaaggtatgtgtgagggtgcagccagctggggtgagcgatgattccctgaagtctgggaagtggtgggtgatggtggtggtgtttttttttttttttcttttttttttttgacaagtaacaaggagttacaatgaaatgtccttctcaattatgaagtgattgccacgcattggcgtcacagcctgttcttgccagtgacggatattcttgtcattcttacagttttggggtaaaggaaatgtactcctggccttctaaattccaactcagaaaaatgttctaaaggaaacactactgtgaaaggattagggacttagactgctccataaaagtacctttgaccaaacctatggcaaaactataattaaaaagatattgtgtagggtcatgttcattggtaagaatttgaaacatatctcatgtagtatgaatggagcttcagttctcagatggagcttcagctattgtatagagggtggaatgagacaatcttgccatggcttcagagagcacaatgagggtggaagctggaggatgaggtatcatccttaacaagggcagaactttctgttagaatagaagcagaggtgttggggaggaggttcgtgtgtgggactggccggcatgactgcaggtgcctttcaggccctggatgctgagatcctctaagtgttgggtaggtcccgctaattatccacaactaggagcctgtctttaatgaccacacgtgggacatgttgaagttttctgttcatcattgagtaatgaaggtgagaaaagactaaaatgagtatagagtgctgtttttttaacctctgcaatattggggtctgtgtagaggaataaagagcactcagttttggaaacagaagagtagaattctaatagtcagtaggcagtagattcttcctcccttagagtcatcaagaaaatggcttgtaaccaagccctacattttaggccaaaaggcagattaaaagttaaaagcatatcagcacactgttatgaagcatttgctgtaaacaggtgaattggtgtagctcagcattctgaactaggggtgattttacctcccaggggacatctggcagtgtctggagatggttttgagtgtcgtgactgtgtgtgtgatgctgttcctgacgtctagtgggtagaggccagggatgcagctaaacatctcaccatacacaggacagcccccaaacacaatgtccaaaaatgtcagtagtgccaaggttcgggaaccctgacatccttaagagcctgaagatacatgccaatctcatttgcttatgtaacactacaaaaaaaattgcatgttaaaattatttatcatacttagctgatcttctgattttatccctagaaagacaaaggtgtgatctttgaacacaggtaaatcaaagacaattttgtttttcctgtttggcttaatcaaatccaagtgatgaatcccattgaacgggatttgacattaacatcaatatcactgggccttggtttttgaacttgttattatttctgacttatttttaaataactgattatgctgataacttaaaatgaatgcagcccagatgggaaggaaataacagaggtcaggtctggcaggggccctaattggcagccgtttttagctcaaaacagatgaaatctccatatcgactgaggttttccctttgagataaaaatgtgaggtcatggaatttcatctgtatctgatatgcattttcatatctataatcaaatctaattttgtaatctggaaagttttgattcttcttaccaaaatctcctgaaaaaattaggcagagaaatagagggggttgtgttaattaatgtattgatttgcaaatgagagcaaaagatctaactctttgaaacgtgtagagaatggtgagaagggcataaaaattcagataagccatgtttcctgagaactggggaagggtgaggctgccttgaactgcgtggaggaagtggtcatcttttattctgagtactaattggaccctgatagcatgtgttttgtctctgcctgagcttcctgtttaaggaaagacttgaagagctagagagacaaccgagcagatagatatgggacctgtgagacacagagaactcaggttgctcattccagaagagaacagaccctaacagtgtgttggagtctctgaggaaatgaagggtttttggtaggttacgaattagttttctcttgctgctgtaacaagttcccaggaacctaatgggattattatctcatatttcaggggtcaggagtccaaagtgggcttcactgggctgactcaaggattgctttccttctgaggccatgagggagagtccgccgccttgcctttccaccttctagagttttaacactagagtttgcaaatgagaagaaaagatctaactcttcgaaaagtgtagagaatggtgagaagggcataaaattcagataagccagagaagaaaggctttcagcaaattaaattcagcagagttcaattgggcaaaaaacgatctgcaaatcagtctccagaaccagaagaggttcagagtgactgaactggggctgtcacatggtcagataatatttatggacagaggaaagaaagtcacctaagaaaatgaagtgatgtgcagaaacagctgggttggtcacagctgggctcttgccttatctgaacaagttttaatggttggccacctgtgcttggctgattggctgagatttggctactgattaaaagagtagcttacaggaggatgtttacacatcaatgaggttacagttcactatgcacaagaagccttgaggccaaacttaaaatatgtgaggaggcagctttaggccacacataatttaacaagaggctgccagcgttccttggcttgtggcccctcctccatctccagagccagcagtcgcctccctctgacctctgcttttattgtcagtctccttctcaggctccccagccactctctttcccttataaggatccttgtgctcacagtggccctctcagatcatcttggaggcaggggctgcttttcccaacttataagcaggagaatgtggctgagagagcccattgctcttcccagtgccccatttctcttaagaacagctaataatggaataacaagttttcatcctgggcttctaatcactcttgtaagggtcagtcacgattgatagaaatatctgggctcttgaatatgatgacttttctgcttaaacaaccatcagtttcaactgaaaatactgtgagcagaaatggtttccatttttatcttttcttcatttgttaaggtataatgggcatagaatgcacatattgaaagtgtacactgtggtacatatgtgtatactcaccacaatcaaaaccatgtccatattcatcaccaccaaaagtagaacacgcatgtcccctgtgatccgaccgtccccatacccacattcccaggcaaactccgatgcttcctatcactataagttagttacattttctagaattttatacaaaagaaatcatatactatgaaatctttttacttcattcagcataatttgagatttatccatgtctttccatgtatcactagttcatggcttttcattgcttagtagttatattagtccattttgcattgctatagagaaatacctgagactgggtaatttataaagaggaggtttatttggctcatgcttctgcaggttatacaggaagcatcagacccgcatctgcttctgttgaggcctcaggaagcttctaattacagtggaaggtgaagggggagcaggcgtgtcacatggcaagagagggaacaagggagtgagggggaggtgccagcctctataaacaaccagctctcttctgaactaatagaggagagctcactcattaccatgagagggtaccaagccactcatgagggatccaccctcatgagccaaacacttcccactaggccccatctccaacactagggatcatatttgaatatcagtcttggaggggacaaactatattgatagtattccattgttcatgcagccagttgggaatgaacattggattgtttctggtcttgggctatgatgagtaaagctgctacaggaattcagtttcaggtctttgtgtggacaaatgtactcttttcttccagggtagtatctaggtacaaatgactaggtcatgtgatatgtacgtttaacttttttagaaactaccaaactgttttctgaagtctttgcaccatttcactttctcaacagcagtgaatgttcccaccctaggatgttccagttactttacattctcaacagcacttggaatcatcagtttaaaatattttagccattctaaaggtatgtagtggtatcttggagtagttttaatttgcattttcttaatgactaatgacattgagcttttttcttgttcttattttccatctttatcttctttcatgaaatgtctatccaaatcttttgtccatttttatcaggttgttttcatgttattgcagttgagagtgttttataaacatgctctggataaaagatctttatcagatatgtggtttacaaatgttttctccctgactgtggcttatcatttaattttcttaacagtgtcttttgaaaaacagaagttttaaattttgatgaaatccagtttgtcagttgttttcttttagggatcgtgattttttgctgtatttgtgaaatcttttcctaacacatggttacaatgtttttcttctatgtgttcttacagaagttttgtatagctaggttttacatttaggtctatgattcattttcagttaatttttatatgtggcctgagatatggattcaggttcatttttcttgcacatgaacatccatctgttccagcatcatttggtgaaaaaatgattcttgtccattgaattatctttgcattttcattaaaaatcaattggctttatatttgtgttcagtgatcaattttccatcttttcactaactttggtttttttttttttttgagatggagtcttgctgtgtcacccaggctggagtgaagtggcacagtctctgtttactgcaacctctgcctcccatgttcaagcaattcttacgcctcagcctcccaagtagctgggattacaggcacatgccaccatttcaggctaactttttgtattgttagtagagatggggttttgccatgttggccaggctggtctcgaactcctgacttcaagtgatccacctgcctcggcctcccaaagtgctgggattacaggcatgagccactgcacccagcctaatgttgattttcttgataactggttttataagtctcaaaatcaagtgctataggtcctccatttttttccaagtctgttttggtcattctaggcactttgcatttccatgtgttttagaaacagatcctcattttctaccaaaaaaaaaaaaaaaaaaaaagcctgttcggatattgattagcattgtgtagaatatttagaccaatttgagaagatttggcatattaacaatattgaatcttccaacccatcatacagtctatctctcattttattttgcctgaacagcaggtgatagttttaagtgtacagaccttgaccttgtgggactcccaactccatctggagtcagggagatctccaggctcagggtggattcttctgcctgagctgcagcctggaaacctccaggcaataactggggaagccaaaggctcagggtatttgtttctgcctctcagagattactctcaagtctggcctggcatctaatgtttgaaaactggtgtttcttatatttaggttgcttttattttcagtgagagggtaaatatggttcctattacttcatttttttaagaatcagaaatcctctttttcactctttatagcagacttcccctatttagatacttatgcaaagcaaatgcaaagtagctctgttattgttaatattactggccaaatacctgaattgcagcaaagctgatggttaacttgccaggcctgaaagacaagcagtgtagtagaatatagtcaaaaacgatctggcctataaacatgaaaaatagtgcttgccctcattagttatcaccaatatgcatattaaaaccacacaaagatggcatttcacaccgaggatggtgaggtaagaaacctagtgggagggttagatgttgatcaaatgagcacaaaatcaaatacagaatgtcagctgtggtggtctagaaaggagaaggacattgtgccctgaaagagaacaacagagggcttgacctggcctaggggctgggaagccttcactgaggaagtgtaggtcttggggcagctgaggcatgagtaagagtttaaccaggctgatacaaagatagaaaaggtttcaaagggagcagcaggcgacaaagtccagtgatggagaatatggaaggcgtggggagcccagtgaaagacagtgctgggcggtgaggtgtctaagccagacagctcttggtggggaggaaccttccagacaccacacaaggaatgactttcagggcagatagagcccttgccatccccaaacctgccttctagggggaagacaggccacaaaccaagcacacggcaacaacataagatgtttgctaatgtgatccagtctatgaagtggtggagaagacggcccaagaaggattctcaggaaagggcaacaggacatgcagaagccctgtggggaaagaggcttgtgttcaagaaagggaattcaggaaagccttgggttagaggtgtgaatttgggagagctctgggtcagaggcatgaatttgggagagccctgggctagacatttgaattctggagagctgtgggtcagaggtttgaattcgggagaaccctgggtgagaggtgtgaatttgggagagccctggatgagaagtgtaaattcggcagagccttgggtgaggtgtgaattcgggagattccctgggtcagaggtgtgaatttgggactggacagtgtttacttcctaggctgctgtaacatagcaccactgtttttcagcttctccccactccgagttcttggctgctgtgctctgtgtttcccccttgttcactcccctcaccccctgtcctccttggctactattattatgatctgacacagttcttccaggctggccgagtggcctcttctactctcaccccctactctctccaggtaatgtcatccaggctcacagccacattacattttaaggttacagtagagcagaagtagtcacatatacaagaacacgggggaaagtaacagtgttacatcgctgaggtggagggtgagcaggtgagtggcatgagaggaggtgacgcctctgcgctaaggtcaggatgccggggataatgtgtctcgtgggaaggctgcaggagtggaggttgggggagtgtctggggacacctgcttcttctgagaaggagggtgtgagagaggtgaggtgtgagagagggtggggttcggtggggctggaagtttgaggagagtggagattgcgttaaggagtggcggtggagaggggagaatgagctggcggggaaaggcaggagggtggccgggctggctgccgtgtctgttagggtcaatcccatgaatgcccctgtgtcctgatggtgatgcttcccaggagaccctagcagagacccaccagggcaccacactcatcccagtgacttgggtgggaagcaggaggggtgaggagttttggatactggcagggatgttcaatgatggccgtggatatggagggaaatgaagaaagagaacctgatgggttgaagaagtaaaaagagtcagcactgggtgggggccgggaggtgagggagcaggggtgaggactgagcaggtgatctgtggggagaggctccggcactgaccccagagattcaaacagtgatttcagaagatgaggctggagtgtggctgtgggaaggatggtgagataaaggggacatgggaggtgaggaggagactgcatggccacaatgtcactcatgtagacattgaagtcacccagggggcgggtgggagcagaggtggatggtgcactgtgagccacatgtcaacatcttacatggccgagagggagtgacgagaggtcactgtgcagtggcagaggtggggtcaggtacatgtttgaggcatgggcttcaaaaaagcagtgtcatagcttttgacctctgtcacatgaggtcatttacaagcagaggtctaagatgatggtcatgtatgtgtccatccacctattcaatagctcactgtaacactatgcctgtgattgaaaaaccgtgttggtgaacatgttgaatgacaggtatctaccagtctccatgttgggcttgcaggcaggaggtagatgaaaacgttctgtcgtcttggagtgttcagagtcagaagcattgacaaacgaattcgagtaggagggaaatgtcacagtcgctctgcattccatagagaggggacagagtgacacactctgggggaaggagtagaggagctggtggtggttgtgtctgaaagcacggttggcttagggaaacaccagatcggcctcagtggcctgaggcctggtcaggggggtgagtgtgttggtctttgagtctccccatccctcctggttggactgactagactgcaggagcttcacgaattcaccagttcctggagtctccttggaataggactgccgcaagcctcgtccggctccttgaggaaggaagagcatccagtgcacctgtgaccccccgagcacaagcactggctgtaccctctgatggaaacaggtttcctacccgctgctgctctgcagtccttacttggcaggcacggacgtagaacccatccagctctgtctttccccatacacagtgttgtaaaatcaaactcattggtcatccctgggtgattgggccctattggaaccttcgcttctgatgtccttagaagtggctcaatgaaatatttttctttttctgaatgtggggggtgaacagagaaaattgccatcatttgttcttcttctgttaattctccctatgatctcaggccaggagtgtatgggcagacagttccctgtggccattgactcagtcttccgaactacagcatttgcccttttattcaaaatcccatctgtctggttttcaatggttctgtctgtagcattttccccacgctggtctataaatgcaggggtgtgtgtgtgtgtgtatggatgcttagatgtacctatagatagaaaggggagtgcctaggccagatcactcagagaaggtgttggattaagccattttgatgtttccattacagaaatcctaaactaagcacagcttctctgacaccagtaacaatttcattactgagccatgagataacagcaggtttacaagagaaggtggtaaaaagattgagaattcaaataatgaatggagtgcacacaggaaagggtactgtgcatgtcttcatgaggaacctgaattaaggctgctgtgccacaaagcaagtaatgcgtaattttttctttggaagcatgtaaaggctttaagataacaagtttctcttaagaaaacctaggattttaaaagaaacagaactaagattagaaccttcatcgtgtattcagttcttttcgtattatattagtagtaatgaatacagatttaattgcatataatgcatttcaagcaattttagattgaagcagagtattatgactgtagaaagtccattttttaactaatgcaaaatatttgcaaaagtatttgtctttacgttatacatcagccattatccattatagtaatgattttaaaatacttcctttttgttctatacttgatttgactcacatatttaatacaatattagagacgtgggaaaaaacacaatatacatcagcaaatacagaacccattaaacaagaaccaatacagcagaagtcccttttcagccacactccccctcctcctgcagcattgttttgtacacttgcttcatatacatacacacagaaacagcacttattactattgtcttttaaatatagaagttgactcttgtctccttgcatagttcctggtgggcactcctgggctttggtctgtcctcaaggtcgttcagggacttgggttccttcctagggtagcatgtctctgtctttggtgaaacacggctttaaaaaatctccaaagcatcatgaaccccgagtttgtaaatttcataaagaaagatgaattattagaagatgaaattgaaaagcagatacacaattttgctctgcagtcatcagtcaataaagagtcaggagtgaaatcccggttcttgtaccaacacctatctgcgcactttgaacagataccatttacggcagtgttgacagttagtgtggcaactgtgcttacttattgttagatttctctcatccaggttggatggaccacagtatatttgtttatttcccggctctctagttctctaggaaaaccaaggggttttcttagctctgtggccatccaggggtgaggggctcctcacaggggcgcagacgggactcagggagggtagggctgcccccttatgaaggtgctccttccttgggagttctcctgggtgtcctggagctggctgtgggcaacagaccctgccccaggaagacgcaggtgtggtcagcacagtgcatcaattaaatcaattccgagactgctccatacacacagggctgaaaatttacattccatacgatttatcttcccaaattatgttcagtcacagtatccgtgaaagctgtgggagagtctacagtgacagtaggctaataatagtaagatgcaaaaggatactcagcaaaatgccagccacctgagacccccacattaaaccacaaacccttcccattatcaaatttgcagtgaaagcttaaattgcacatcttggctttagctgtcctattatcatcacaatctatttactgtctgtgagaataaatcaaatgaattcattgtgcacatctgaaaatgaatctacattcccttttacatggctactttttcatgacatataggttatctttgccacattgctttccattttaaaagagctaagagtttctcaaagtaagtacttttctgagagtccttaatttggaagaactctgctttctctgagtcgctaggggagaagttaacagatgctgaaagatgacatcagcatttaattgcaaatcagttctgttttctggtagcctggctattgtgctcacatttgaaaactgttttgattcttaaatttttaccgtgtttgctaaatctggatagattatgaagtcacattcctaaaagatacttgtatgtttagaggcgagaattggagatcttcaatgaattggagggttgccttgcttcttagaccacagaagcagctcaggaatatagtgctcacctggtgcctagcagggtaagcccaggacaggagctcatatttaagtacgagaaatggagtgtatgcagggagaaaatggaaactacagttttaaggatgctttggggaatatggaatccttggtgaaaaagggccattatacagctttcttccctggtaaagggatgaactcctgaattttaggtgtggggacagggggtgggagagggatgggggagatctgagttcataaaagtgtctttcaaataatgtgaagaacagctggtatgtgtcatgtaaagggtcagagaacacacgagctgtagaggggcattttctgaggaatgcatgtgcttttagatttgccacaaccctgaaagctagatctgaggctcagcaagatgcagcatgggcatttttgtcaatggaggagtggattcctttttctgcacacagcagcatagctgacatttttttcccttcttaataaagacatccacccccttgacctttagagctgatcttctaaaagaccgtactgtttcttgcataatcatcacctgttctgctacacaattgctctgtttggacccatgcttcgggataggagacatcccctgagaaggccagggtcagactggctgggctgcaagcagccggaggtgcctgctgtgttcctgcagtttccagtgtgagctgcagaggagagacagccactttgtgagtaaccaccataattctattattaggtgagaggttaataattgacatgttaaagcatatccgggagggtatagagggtaagtctaaatgtcagtgttcattagtggttttttgtattacaagttttcttattcccagtattcataagatgtcactcttgagtgttcatgagatcaactaactcatcagcaggtaaacacacagggccttcgtggcacctcaagcatttcataacatgaggttccttgagattgcaaatgtgatagaataaaatctgtacacagtataaatgagcaacggtgtcagacaacgacaagacaaacatgtttccagcatgtccccatttcatctaatgtgatgtgcgaaagaactgaaaaaggaacacagcaaactgggaggctcagggcacgaggtgcggcagaggagcgaatagaggccaggccaggccggcccaagtactaattcatcacagttgcaggtgtggttgactggaccctaactctgggaggtgccggctgatttggtcaccacagttgtcttaggggcctgcacggctatggtcccattttaagagctggggagctgagttgcaatgaggccagcctacacatggtggagctgggagagcaccgggacacgcagcccaagctcctggtgcccttgcattcatgtgccagcttctgacaagggctgctgttctgggattttactctaagagcgcagggaagccacgtcgatggtgtagggggagaggatgcccccgctcggcaattaacacgaagcccctctctggaaggaggatgctgtggcattgcctgggctttgtcacagttttgtcattctgggccagcctcccccatcctgtgcacccctccttccttccgtgtggagccccctttcctctaggatgcagtctgaaggccagcttgtgcacaaggcctcccgtccagtgtcccctcagctgagtgtgaccttcctgctggcccttagctgccctctggcactgtagtcacctctgtcagtgcctctcctgattgccaagcattgcaagggcctgtgccggttgcctggtggccctgaggctctgagccctctgcagagtttaatacccttctgctgagtgacatgtttagggccagcctctggtcagaggaaaggccaggctaggccactgcttgcatctttgaggggtgaggcttgcctgtggaggggactgggctcagtgagtgggtgtcatgtctgtggtcagtagctggcccctggggcgactgactgctgggttcaaaatcctgctgcaccagggacaagctgggtgatgtttaagttgcaaggcttggggctttttcttttttctttagaggtgcagtctccctctgtcagcccaggctgaagtgtagtggtgcgaacttggcccactgcgacctctgcttcccaggttcaagtagttctcatgcctcagcctcctgaatagctgggattataggtggcaccaccacacctggataattttttgtatttttagtagagacagcttttctactaaaaatggctatggtggccaggctggtcttgaacttctggtctcaagtgatccatccatcttggcctcccaaagtgctgggatcacaggtgtgagccaccaagcccagccagggttttttcattttaaatttaagagtaacagtactactcagctcatgcattcactgtgaagattaaatgaaatattacatatactcaatgcatggtgagacttaataaacagtatttattgtcatcatgatctgggtgcacatgccaccccaagaaaggacagaaattagctctacctcaagcataacccagaagtcctggggggaaatggaggcaggcgcggcccaaaggctgctctgcagaccaggctgcaaagtgtgtgaatgattcctgtctgcagcagccccactcatgggagccgaaccacccaggtgtgtgtccctgtgaaggttaaggaaggaggttcaagctggtgtgctgagggagagcttgtgaccacagccacacactgtgtgccctcgggtcatttattgcacaacacataaagagatttcagtcacctaaagctcttgatgatcagaccaggttatctgtaaatttcaggagaaaatgcacctgaattcactcctgaaggttgtgggctgaggggctcttctttcagttttccttcatctcagagaaagagaacacctgcaaagccttgactccttgtccagctggaatggccaggccctgtccctggggctggctgatcttgacgctgatgctccatagccggcagctcttagtgccttcgtcatgggccaccatgaaagagggcggtgcccccagcccctccacagctctccaggtggacggtcttgttggtggtgacttcagataagaggtagggagcaggagagcaggagaaggggaggggagagagagagagagagagatcaagaaagaaaagagcaatctagagtgtggactgaagctgtgtttaatatgaagagaaggggaacactggaggaggcagcaggcctgggccagctgaggaaggcagaggtgaatctgctgtgagtcacctggcagagacctggaaacctttggcccccagctccctgtccacccccatgtactcctacctcactgcccccatcccctgatggctctcaggcctatcttctgcagctcctgtccatgaaaatgactcactgatggaatgacccacaggccccagacagccattcagccaaggaggagggaagaggggggaaagcatagctctgggaccaagtgcgggaggtgggggctgctcttgccaaacagaatcaggaacaaggagcagcacaagaggtgctgagcagtggcctcagccagcgggctctctgctgccaggggcatgccatccatcacgtggggtaggtctctttgctgtgggtacccaagaactctgccaggccctgctgagggtgccctgaaaacctcagccagcctgctatccccacctaaactctgctctggttcttcctggagctgacacatttagttcagtgcatcccagacatcaccatgtggaagtgagaggctcagctggtccagcaaggagggccacccttctcccatggtcctgtgaaccaaaagtatctgagatacgtctccattaatttagaaagtttattttgccaaggttactgtcaatgaaaagaatcacactctgtaaaatatttgaagggattcattctgagccaaatatgagtgacccatgagctatgacacagccattaggagatcctgagaacatgtgccctaggtggttgggctacagcctagttttatacattttagggagacatgagacttcagtcaaagacatgtaaagatgtacattggtttggtctggaaagatgggacaacttgaagcagggtgtgggattgttccaggtcataggtagattttaaaattttctgaatggcaattgattgaaagagttaggttactatctaaagacctagaatcaatagaaaggaatgtttgggttaggatgataaggggtggtggagaccaaagttttatcatatagatgaagcctccaggtagcaggcttcagagaaaacagattgtaaatgtttcttatcagacttaaggtctgttgatgttaactctggtcggctttttttgaattccaaaaaggaggagggtataatgaggcatgtcttacctcccttccatcctggcctaaataactttttcaggttaactttggaatgcccttggccaagaggagacatccattcagatggttggggggcttacaattttatttttggtttacaggcagtcctgacaacatgtgcacaaggcagttagggtaaagcttggttttacacattttagggagatatgagacatcaatcaaatacatgtaagatgtacactggttttgtcctgaaaggtgggaccactcgaagtggggagggggcttccaggtcataggtagataagagataaatggttgcattctttttggatctatgatcagcctttcactgaattaaacaatttatatgtgagaggggatagtagtcgcttcttagtctggctcagcgaatctgcatttttatataaacagtggggcagaggaagcaatcagatatgcatttgccttagatgagcagacagatgactttgagttctcttctttgttccgcatctgtgaagataagccatcactttacatcaccaaagtgaaattcagcagaattgttttagggtaaagatcttgaggagtttccttgtgggcatattgtgagggaggtatgtagcttttttttttttttttcatctttgtagctacgttatttaggaatagaatgggaggcaggtttgcctaaccccagcttgacttttcccttgggcttagtgatttcggggtcccaagatttattttcctttcacagtcccttgatccctcgtgcctggaagctcctccacctgtggcctgagttggatctgcttctcctcccagcagtctacttccttcctccatcctttcttcctcccatgaatcttcctccccactcctccctccctcctgctcctccatggggcaattcacccaaggcctggatggtgtcttggcaagcaaggcagggccagtgccttgttggtggatctgagggccctggtgcatgggacgtgctggttggcaaaccattcctagaatccaccctgagcacctggttctaggaatggtttgccattccagcatgtcaaatggttgctaaatgctttgccccactggtgactgaggtcccaggggatggagacccctcggattgtcctagaggaatgttccctctctgccttactgctttcttctgtctttccctctgcacccatactgctgggatatgcctgcactctgcagtttgctgactcctctgcaaccttggctttggtttctccccaggtcctgaccacctggccgtgggcccctccctgtagagccacactgcaggaaaacaaggctgcttcagcccagcgagacccatcttgcctgggtgccacctcccagcctggatcagcactcggagctcccacctgcctcccaggggagtgggcatccaccctgagcacctggttctaggaatttcccttcctttcatttctgaggcagtgccggccggcttggccatctcatgctgtctcacgttccgcagctggtctgggcccaagtgctgaggactcagggatccctgagaccgttctgggcaggtctggcttgctgccctcccctggagaatgtggcgacccagcagcaggtggttgagagtgtccctgctggtgaggacagaacctggaattctgttgccacgctccctgtcctggctggctgatgccctccagctgtgggctggccatgctcctgatgggcctgatatggatacagactagcatgtcccatgcaccaggaccctcagatccaccaacaaggcactggccctgtcttgctttcttctcttggtgtggctgaaaacaccaggctctaactctactagttaagcaggagcctgggagtctccaacatccttcctggcagggggcatgcagagaacatagtcttcagctctggccaagcagccatctgtccagcctgctggtgctagcctgggtagatggcctggaacttaggggcagagcccacctgcacaggcaaacttgggggaccatgagggatgatcccacagacccagaatgctcagccttcttctttaaacttgcagcggaggcttcaatgtgcacctccgcctccccctacggattgtaaaactcacaggcacagggaccggggcttgcccaccaccctaaacaaaacttgctgatgacttactgagaagatgaaggcagtggtttcttgcagccattgtgtctgaccatgggccccagcaaggatgtgagggacctgtgtcactggcaaacacactgtcaagaagccaggtgtgtaaccagcctatgatgaaagcctgcagaggtatcagtctctttcctggggaatcttttcacctgcgtcacagccagaccctccatcactggtagaagggtctagggactcctccagaagagataactactttctacttaaggaccaaaatacttttagcctctgaggcatagggcagctcacagatgaaactctcttctatcttggtcaaggttgcccccaggcagggggacatcaccagcagatgctcgtggttggtcagtatcttgagaagtacacaccacccaggtacaccattagggtgtcctctagtacaacaggacagagacaaaggctgtgcctactgtctccaaggagtgggagaggacaagcatatggcaattttgataggcttctcacttggcccttcgagttggccatgttgatcaagttcatggtcttcccctctcaggggctcccctggttgatctttttctgccctgacaagctcctggagtctgttccctccccgtcttccgcagccaacccccaagtgtgtggtgggcggggtgcaggctgcaagcctgtgattacagcacctgccttgctgggaatggcacgggcataggagcagtcatgcccactgcaacagtcagtgttgccacagcaatgcccagaacaccaccctgagccccgtggctgcagacagtggcatctgtttggtttatgcgtctgcaggtcggggctttcacgggcttgggctgggctccctcctgtggctggcactccccagctgtggctggggacagggcacacctaggccacaactctccctcatccagcaggccagcccgacaccttctcaccgtgacggcagagtggggagcaagcaaagccacactgtgtgagctttccaagggcccattgtcacccctttgctaataccccactggctgcagcccatgtggctgagcccagagccagggtggggggtacatggcaacctgtgcagacatggaaaaacctcagcctcctcttctcccactgaaacgggcttagagctcttcctgtctccccacgcgtgctgcactgtttcatgctctttctcccaaggaacttctcctcagctcagctcccgctctgtaagtggaactctgatttcatctgagcaccctggcttccacagcattgcatgcccactgccagcccgttcctcccctccctcacccactgggctgacgatcctctcccacttgctgctcagtttccctcctggtttgtcccagctctggggcccatgggcagccccctcacccttgtgccttgccccccatacctgggacactgcttggggacagtgcccaggattctacctactctgagaatggggacaagaaatctacacacaagcttaagtcgcccttatcctaaaaaggtacttttttcctgaccttgtgaattcttccaagatcttattgatctctaatttgccttttgtgagaaaatgttttgaaagagtaacctacacccatcgctttcattccttaccacccacttgctccttgtcccttacagtcttttttttttccacttttttttttttttttgccccagaagaccaggctgtcaacagtctgcagtgttaggagtgccacatgtgttcatttattttgtcctctaaaaacctcgaaggcttgggtgctgcatacagtcaatagccgtttgacccatgagaaaatcagagctcagcctggtcatgttgttcatgaggttattgggagcaggtaatggactgtaggcctttctgactgcagagcctgttttaagctgttgtgctgtactgactcgatgtgcaagtctggagtgtgctagagtcagagcctccaaacccgtcacgcaaaggggctgtatacgcttgctagggctgctgtgccacagttgagtggctttgacaacagaaatggtttgcctcgctgtcctggaggctggaggccacagggtcagcagggccatgctccttttgcaggtgccagggaaggtcggggcccagcccttctcccagttcttggtagcttaactccagtctccacattgcattctccctgtgtgcatgtctgtgtccagagtctccctttccattaggacacaagtcatattggattaggctctcaccctaatgacctcatcataactaaagttgacaactcgggggcaccaacacaccccccttcccccatgcagaaatggccccactgtttctggggcctttcaaaacctgcatgtaacctttgactcccccaaaacttaactactaatagcctgctattgaccagaagccttaccgataatgtgtcagtggatgaacacatattttgcatgttatatgtactgtatactgtagtcttacaataaagtaagctagagaaaataatatttgaaaatcataagaaagagaaaatatatttattcattaagtgcaagtggatcatccaggtaaaggccttcatcctgtggtctgttagtttgtaacaaaatagtgtatgtcttctcctaaaatttactattgttatttaacaacttcctttaaaaggaaggtaagtggtttagtgaaactgatgagaggaaacaaatcctgatttcaattgtgaattaagggtgttattcacacaagttatttcagttcctgtcttctcccttttggttaagatttccacaggattgctgtagttctgagatccaggttccctttttggcactttctggatttttttttttttttttttttttttttttgagacagagtctcgctgtgtcgcccaggctggagtgcagtggcgctatctgggctcactgcaagctccacttcctgggttgatgccattctcctgcctcagcctcccaagtagctgggactacaggtacccgccaccacgcctggctaatttttttgtgtttttagtagataacagggtttcaccgtgttaggcaggatggtcttgatttcctgacctcatgatctgcctgccttggcctcccaaagtgctgggattacagatgtgagccaccgtgcctggccactggatttttatagtaaacaatgacctctgtgactcttaacgagagatgaatagatacaaaaagtcttataagcaaaaacatcgctgaaagccagagtttactgcaaaatagacacatgacattatttaatttttttcccaaatagagaacctaagtaaaagccttagcaatttaccttttgctgagaggaactagctggactgtacattttaagaaaatcctttcttcaaagtacatgtgaggaaaaactaatttcggggacagccctgcttccaagcttgtttctcctgtggcatcccctctctgttagcagtaatttaataaaaaacctgaatatgaccctgttgtgagctgagtcaggcctgaccctgagccaggggccacctggcccctctgcttcactctcaccattgcccactcatggggcttcttttctgctcatggttcatcccagaaggtttttccctgccatcccctagaaggtcagaccagccaggacacccccggccttcctgatccttcccctttggggcgacccctggcaggcccccccccaattcctaggtccaccgtttctggggtctttccagccaaaccatgccaaggtgagcctcggctggtgacacgtcatagtcccctcatgaccccacctaaatcagcaaaatgaagttgttggttcttagaaataatttaaaacacagaggcatttcctcaggcagtgggatttgagcatcaaagacacgcttctgtccttcgtccttctgccctcggatgtcgcggctccttggctccacagtgacttggagggtacgcggtgtgtatgtgttggctgcaatagtgtgagccacagtgacacgtggcatggttctgagctccacaaggaaaatggcagagccccgttccaagtccctggcaggactcgggactctgcgtatgtctttctcagacacccctgagacctgcccggaattgtgtttgtggcttgtccttcaaccccactcctggctcctcctgtgaggggtggaggccagtggggtccatccctgcccacccctggagtgctccatcctccaggacgtggccctgggccctccaggaagcagctgcggctcttcctgaggctgggagagctgtttcccagtagctaccatttccatttggatccagatgtgacatcttcccatttctgacatcaccctggatgtcacatcagttttctttaattgacttctcacgtttctcaaattcttgctggaagaattgggagcgtcctttggtgcctgggcagctatgatgcaggccacaaccacaatgctaggctcaaaggtgcccttctttgcccacagccaagcagggccgctgggttcaccttgacctccactgactcttcctaagcaggctcagtgtccagggcccgggcatggcctgcagggctgtgggggtacctccccgctccctctccttcctggctctcagtttcctgagctgcgtgtccccagtgttctcttccagaagtttcattgtccttgtgcagagaaaagcccctggaaggcactctgggacgtgcattgtgccccagttcagcactagggtggtggctctgcaccccaaggcctggctgctgcacgataacatgagcctgacaaatcccagggtgcagagaatccagggctggtgcaggatggcgctgcccccgcccaggctcatgcccagccttcaatgaatacagttttagttactgaatgacagtggatggtggagcccatggagggtgtgatgaacaccaagtggggcctgacacagactcggcagcctcaggaaggcaggaggtagtgaggagcgcccgaagtgtgggaggaggtgacagggtcagggggcagacatccttcccatggggcccagccctgggccagggcagagagttgaggtaacatcagtagatgagtgagcactcctgagttacgaatagagaacaaatcgccaaaataacagcatgcatttacacatgctcacacgtgccaggcactgctctgagacgataactcagttaatgctcacaattctcttatcctcatccgagaaatagaataatttgcctgggcgtgcagcaagtgagtggtggacccgaaccagaacctacgtaagcccacgtgcttgacctgaattcagaggattggaaacccagggcttagagcttgaaaacgcacagtgtgatctaaatctaaatctcttgggcagagcttttctccatgctctaaaattctgctcttaaggccatgtgagagatgtatgtgtgtctgtgtttgtatgtgtatatatgtatatgtaagatatacacacatatgtatatatacatttttgtttacatatattttttagatcagatagaccctgtctggcattccgatttaacctcagctaacctgttttcacacatctgtgcactaaaacaactcatttttttcctttccagagcttgtcttcaagagtagctggtgcagaaactcggtaagaagggcctcgagtccgttcttccctctccttcctccttctttctcctttaaatcctacctccatttgcagattgtataatctgtatgttaactccgtaatccatatgttacctctgtaacatactgttaaaatcaccacaaatttgatagtttcacacttttcttgactttcaaaacatatcatctgtcaaggtatttgagatgacttcttcctttgtgaagtgaggcctcctcttagcaaaattttagaccctacatggatttcattaatatgcactattgctactaaatgttctgctagtgtggccaatccatttataggcaaacttgggaatgattttgttttgaaagcaaatacaaatgaatcaccttacacccgtggaaaaccaatcacgagtcttacattttaagatactttactgtgataaaaacctgggagtgttttgggttttgtatgtttgttactggatgaatataaccttagagttgaacacattttaatagaaatgtgcacgtgttcataaatatgacatacttaagtcctgttgtagattaaactgtattacaaaccacttcatagttgtaaggtcaaaatgtcttttttgatggacaaatagaaatgttgcaaaagatcgttttttccatcttagcattatttgtaactgtgatttacctgttggacccaactaaagactaacaagtaaagaatctgaggaaggtcttttaggtaataaatgaaatatctttttaaattcctttttctccaattaaagtggaacgcagcttctgaaaatctttaacgagctagacaatacaaaatttagataatttaatttgagattatgtttaggtctcagaaaacctgagaggtctacgcattaatagccaatgatgacacagaggcacagctaattggcgaggtgagcgctgcttgtttgatgttttagcagagggttacttattgatctgcaccataggcctcacctaacattgacttttcatttgctatttgtcctgtgttttacttaactgatgcattttttttgaaatttttaactattcacatttgtttgtgagaagaattacattacagcatttaggttccaacgttttgtgtatcatacgagtggattatcagtcacatatctttgtgtgttacttcaaaagcatttggtgtacactcgagaaataattatgacaaagtatgaaaaacttaatttgtctgttttaggacatttcaaatatttaagatgcagaagaatactgaggcatatctgattgagtggatctcaacagacatattagaatttggttgatattcagggaaagtgaacgtgtctaaagaaggggctcctaagttatatgattcttattattattattattatttttttttttttgagacggagtctcgctctgtcgcccaggctggagtgcagtggcgggatctcggctcactgtaagctccgcctcccgggttcacgccattctcctgcctcagcctcccaagtagctgggactacaggcgcccgccactacgcccagctaattttttgtatttttagtagagacggggtttcaccgttttagccgggatggtctcgatctcctgacctcgtgatccgcccgcctcggcctcccaaagtgctgggattacaggcgtgagccaccacacccggccatgattcttatttataaaagaaaaacagtatatagttttatactgtatggtttgatagcagtggagctagttaaaatttctgcatacttttgtaattatgttttgtttgtgaacttacagatccattacctagccaaatatttatgtgtattttaaagcatttttaatatcacatgctaaatagctaggaaacttttcttgagcagaatattactagtgcattctctttcttcctcttgtgtgtactttataattagaataaatatcattaatgataatgcttctctgaggtcagattttatttaaaaaataaaataggactgctaaaaaaaaaatgacattttgaaatactcgttggaatcctaggcagcttagggctctgtagagcaatgggagtccaagggtagagaatcatttggtgtttaggaaaagcttctattatcagtgaggtcacattagcgttcacaggcatagatttcaacatgccagtgaagactggtagggttaggagtctcatctctctcgccctggagtctttctgtggttttcaggccagccacacctctttgcccccatgtcagaattcagacatctacgtttattgaagcttacctttaagctctatctttattgcactcattgtgtgaggtgcggactccagcttctatcttaggaagtccacctcagagcaccaagcctcaccgacagccagacttaaccagctgcatacagcttctccctgttggcatgaaacacaccaacatttgggatgatgacttgaggaatttggatttttttgagatctgtgtgttttaatgttttggtattttacttagttccttgttttaaactgttccatttcaaacttaagcatttcattttatagttagagtgcttgaacttctaaccaatatgcagttgacattgttctaagttatgaaaaaggcaaaaatatagtgctgtgtacatgtgactttatgaaaacttttttgttttttaaccttaatcaaatttttcattaatgcttaagtagaatatattagtattttaaaagcagattcacaatccatttgagttggaaaccattcttggcccacaaacccagtttccctcagaggccgtgagagggagctgttgaaccttaaacgaattgtatttaacctttaacagtccatcaggctaaactattcagataatccatctataaaatttaacttacattgtaataagcagtagtatgattttcatttctattaaagcagaagttatgcagttaattaagagacatttcagttaaattcaatgaatactttttagtacatgttatttacaaggcactttatgctaaaagtgggcataaaaataaataatttgggccgggcgagatgactcatgcctataattccagcactttggaaggctgaggtgggtggatcacaaggtcacgagttcaagaccagcctggccgagatggtgaaaaccggtctctactaaaaatacaaaaattagctgggcatggtggtgggtgcctataatcccagctactcaggaggctgaggcagataattgcttgaacccaggaggcggtggttgcacagggcctagatcgagacactgcactccagcctgtgtgacagattgagactccatctcaataaataaataattggagtggctcataaacatgtgcatgtctgtgtgtgcacacctgcattataaagtagaacacaatatataaggaaggtatattgagtttccacagaaaggaaggtattaggagaggcaggagagaggagctggcctctaagaagggctggagcatttctgggagttgacagagaatggggagtattccaagtgcggagcacagcataaggaaagaaagtttggagaatcctgaagatgcctgtttgctcaaagcatagcttgcataaagatgattaagagaatatcaggcatagggcagacagtgagttgcacctgtagtcccagctactttggaagctgagtcaggaggatcacttgagcccaggagtttgaggctacagtgagctatgattgtaccactctactccagtctgggtgacagaacgagaccttgtctcttaacaaaaaatataaaaattaaaaaccagtatcaggctgaaaagctaggttgggctgcattgtactcaaacataaatgcccaaggactgacttgtctctaattgttttgaacgtcaaaatttgaccaaatgatctcttaatctgtgactgtatacgccgtgcattgggcattattcaccagatgttaattgaagtcatactctgtgaaggttgttggaaaatctttttttttttttgagatggagtctcactctgtcgcccaggctggagtgcagcggcatgatcttggctcactgcaagctccacctcccgggttcacaccattctcctgcctcagcctcccgagtagctgggactacaggcgcccgccaccacgcctgactaattttttatatttttagtagagatggggtttcaccgtattaggcaggatggtctcgatctcctgacctcgtaatctgcctgcctcggcctcccaaagtgctgggattacaggcgtgagccactgcgcccggccagttgttggaaaatcttaatgtttcttttctcttttctttctttttttttttttttcaaatggagtcttgctctatctcttgaaggctggagtgcaatctcatctcactgcagcttccacctcccagattcaagcaattctcctgtctcagcctcccgagtagctgggactacaggcacctgccaccatgcctggctaatttttgtgtagagatggggtttcaccatgttggccaggctggtctcgaactcctgacctcaggtgatccacccagccttagcctcccaaagtgctgggattataggcgtgagccactgcgcctggcgaaaaatcttaatgtttcttaattgcagtattctgaaactgataaagcacttgtaaaactttcaaaataatttaaagccattttctttttaagatagaaatgagtacttcttagcatactagaggtaactttaaaattttaaagtaatgtttaatgagtacagagtttcagttttgcaagacaaaaaccttctgatctcttacaaaatagtgtgaaaatgtactttactgagctgcacacttgaaaatggttaagatggtgaattttaagttatatgttttccaccacaatttttgaaaactaaaataagaattttttggggctaaaacaagaagaaaccatctacaggaagtggaatgaatttagctcttatgttttctggcagcatgtgggaggatttggggtcaccattgtgggccatgttgttttcactgatgactacttctgcaggaacataagttttcctggaattagactcaagcaaaatgtacaaggcaggctcttgtagaaaaagaaacattgaatcatgagctggacaaaaactttagttaccattttctaaaaaaactatatagaggttgttcaaatacacttgaatcttctttttttttattattattatactttaagttctagggtacatgtgcacagcgtgcaagctcgttacataggtatacatgtaccatgctggcccgctgcatccttcaacccgtcatttacattaggtatttctcccaatgctatccctcccctcacctcccaccccatgacaggcccctgtgtgttatgttccccagcctgtgtctcattgttcaattcccacctatcagtgagaacattcggtgtttggttttctgtctttgtgataggttgctcagaatcatgatttccaacttcatccatgtccctgcaaaggacatgaactcatccttttttatggctgtatagtattccatggtgtgtatgcaaatacacatgaatcttctgtgaaagctgtagacattaaggcatagctcagtaaattcatttctctggagtgaagatataactgatttggatactttgctttttatcttctaatttcaatagaaaagtagggaataatgcaggttgtttcatagtgtggcaagcagaataatagtccctggaagatgtccatgtcctattccctggcatttgtgaatgtgttactttcaatggtaaagaagaattaggttgcagatggacttaaggttgctaatcagctgatcctaaaataaggagatgatcctagattatctagaaagcccagtgtaataacaagggtccttaaaagtggaagagggaggctggacaggaggccagagagatgcagtgtgagaacccgatctgacattgctggctttgaaggtggaggccatgagccaaggaatgtgggcgcctctcaaagctgggaaattgatactccctgagaagcctccagaagagaatcagttctgccagcaccttggttttaacctgcgagacccctgttgaacttccaccctgcagcagtgtgagacggtgatctgcaatgtttcaggccacagcatgggtggggatttgttcagcagcagcaggaaacaaatgcatgtggacgctaatatcatagtcagttcacagcaaaatcctggtcacctgtactgcaatagtccatgacggtggtgaataagttgtcagcttcaatacagatttgaggggatcagaattgccactgtgctgaagaggctctgagtcatgtgctgcggaggtcagtgtgtcagagttgggtttcattcagagcaatccatttctacacagacattggtagaaggatggctaagggaggtgaccagtcacactgtgaactggccccatccacatccacagtttcctgatccatggttgtatgcgctctaagattcttcagactataggactttgaatgaaagatgaagtatagagattcccagaccatggtgggtgcttaactatttattggatggatggatgaatggatggacggatggatggatggatggatggatggatagatggaatgaaggaatgatgaaccaggctgctgactaaagaagaagaaacacccctcattctcttgggttgtctagtgacaagaccaaccacatgcaagaagaaaggagagtgctatctggagtgttagaaaccctctccctctgagtcccatgccaccagggccctgctggtggccacacagcacggttctacagagcagctggcacgctgctgctgatcccgctatgatgcatccagtgcttactagatgtcacacaggaagtttttcttaaacattttgttaatatttgatgacataaaaatgttatatattatatatatgttatatatatagtaaaactccctctctagaaaaataaataaaaattgaaattcagctatatttgcctgccgggtgcagtggcacatgcctgtggccccagttacttggcaggctcagatgggaggatcgcttgagctcagaagttagattccagccctgggtaacatagcgagaacccccatttctctaaaaattgttttttaattttaaaaacattcaaattcatatatatataaatatatatataaatatatatataaacacagatgaagcataataataaagtgaatatccagaccccccatacatcttaagaaacagactattataaaaatctaaagttccctgcttattaaatccatggttgcacagtcctgtcttctttctagaggtagccactgttgcaaatattatgtttaattctctttccttctttattattttaccatgtttatgtccttaaggaatattttcctatttttgtttatttcctaaaatttttattaaaatgaatcaaatttgtatgcattctccttctaaatgcttttttaagttaaccatgctgatacttaaattagattttattcattttcactgctctgaagtatttctgtgtacttatataccaaaaaatatatataataataatacatgtgtatgtacattcttctatggatggacattaatttccagttgtaactattacaaaaatactttccaatgaacattctatgtgtctcccagtaaccatgtgcaaatttccttaggacatatatttaggatttgctgggtcatagtgtaattatatgttcagctttaaaaaataatccaaacgcttctccaaagtagttgttccaatttatatgtaaaacagtggcatatacaacttccctttgctctaaatccttactaaaatctggtattcctggttttcaaatttctgccaatttggtgaatataaaatggattttattacggtttaaattttcctttttgtgactttcaaagaatttgagcatcttttcatagagctgttagccattcacatttttttctatgaaatatctaatcacatcttttaccttttctttctttctttctttcttttttttttttttgagacggagtctcactctatcgcctgggctggagtgcaatggcgcgatctcactacaacctccgcctcccaggttcaaaggattctcctgcatcagcctcctgagtagctgggattacaggcatatagcaccacgcctggctaatttttgtatttttaatagagatggggtttcaccatgttggtctggctggtctcgaactctggacctcgtgatccacctgcctcggccttctaaataccttttctttttactgggttgctagttcatatatcttggctactactttgttggttacattggttgcaaatatattcccctcaaagtatgatttttcatgtcgttttatggtatcatgatgaacagaagttcttaatgtattccgtctttttccttttatgattaatgcttcttgtgagttaagaaatcctttcctatttaaaagtcacatagctaccctcctctgttttctgctgattttggagttttgtgttcttcacatgaagagcagatgaattattatttattttgggggtgcactggggagggaggtgtgaagcaaagtagagatcctctcttgtgttccagatctggtttcagtattaattatttactagccttagtgatggggagtgttcgtggttcagtttgggtaagatggaattatttggccctttatgtttggtagatactgtttacaaaattgtatgtaggaattggatacaaactgctgtttatttatttgtttattttttatttttattttttgagacagagtctcgctctgtcacccaggccggagtgcagtggtgtgatctcagctcactgcaagctccgcctcccgggttcacgccattcttctgcctcaacctcccaagtagctgggactacaggtgcccgccaccacgtccagctaattttttgtatttttagtggagacgggttttcaccgtgttagccaggatggtctggatctcctgacctcgtgatccgcccttgtgatcctgaccttgtgacctttgcctccgcctcccaaagtgttgggattacaggcgtgagccaccacacctggccaactgctgtttattttataggaagatttaaaatgactgactcactatctttagtttttgagggtactctgtttctttataagtcaattttctattattctagaaatgtgtacattttgtatttttaaatatatagtatatatgtaagaaagttgattatagtatagttcagtcttttctctcttatatccctgtcatattacctttttgttcctgatattttttgtttagccgttttttttttttttttttgagacggagtctagctcggtcgtccaggctggagtgcagtggcacaatctcagctcactgcaacctccacctcccaggttcatgcaattctcctgcctcagcctcccaggtagctgggattacaggcgtgcgccaccacacccagctaatttttgtatttttagtagagacggcgtttcaccatgttgatcaggctagtcttgaactcctgacctcatgatccacccgcctcggcctcccaaagtgctgggattacaggcgtgagccaccatgcctggctgccttttctttttttttcaaacttgccagaggtttagtgattttattaatatttccaaagaataaactttttacttcctaatttctgtgttgtatacttgatctctaatttcactgattttagctctttattatttcctttcttctacattcttgggttttttgagttgctgttttttatctttatgtattagttcttagttcattaatgttcagttcttcttttctagtataagcaaataagcctcttttctggctgtgtgaccttggtcaggtaacttaacttctctgtgccttagtttcatatactcgaaattgggtaacaccagtatcatagcatagttgtgaaaaccgaggaaattagtatatgcacggatcttagaagaacacgtggtgtagattaaacccttcaggagtgcccttcctgcctgcttgttcctcttccacccctttatgctctttactcttcctcagctctgctccagcatctgcttaaacatcattagccatgtaacaccagaaaaactgtgatgaaattgtttttgttataattctgttttagtagtttttaatttctattatatttttctttgattcataaatttagatgtttttataatttttaatttccaaacatatagccataagcaaactcttctctaacatggagtcaggactgttaaaatttatgggctaatacacttaatcttttttaaatccacaagttaccctattattattatcttctacttaggcttgttcagatacacacacatacttaccattttctttgctcatcattcctttttgcatttgagctaatttattttcttccatagtacactcttccaaaagtcttttagagaggatatcttgttggtatactgctcccaacttatctgaatgtatcagttcatgtgcaggtgtctatattttgccatcattcttgaaacagttttgctgggtacataattctgggttggttgttagtttctcctagtactttacagataatattctcctgactcccttggttgcagttgtgatgtcagctggtgtctaattaaatacaaggtcctatcttttctctttggttgctttgaaatctttttttgactttggcattcttcagttttttagtgatgtgtctaggagagatctggcattatattctttatgcttcctaattctgaacattgataactactatcagttttggaaaattctaattgcctctcttttattcaccttactatctttgtatagaattccaattgaatgtttgtccgttcttacgcttcaagcttttactcacatctttctgtcactttctttactcaactgtgtgtaatctgctatttaactgttgctttgagtttttcatttcaataattatatttctctattttaaagatttgtgttttttatgtttctggtcatttctaaaaatatccttgctcatggcttcaatttcccctgtttttttaaacatgaaaatgttttataatctacatctaataattttacttcctaaagtcctggtgagcctgggccagtatttttttctttctgctctcttttgtttcctcgtatgtggtttttttgttgttataagcttatatttattcaaaacctttatttttaattatcgaatttatttttaatagtttttgttagtaacggggtctcactgtgttgtccaagctgaacttaaactcctgggctcaagtgatcctgtcacctagcctcccaagtagctggaacttacaggcatgtgccaacacagccggcctctgaaaatcttttcgtgggaatactttaaagtctggggcaaagatgcatcttttacagaaataatttttgtttgcttttaccagatgcgtcaggacagtacaaatttggatctatttaatataaacattttagcttacatttttttagacaaatagtgtgaaatcaagacccaaatccatgttagggctggctgatagccacagattctcaggagtagggttgccataaaaaatacagaatgttcagttaaatttgaatttcaattaaacaataaaaaaattttgtatgttatttacataaaattcaaataaactggggaccctgtatttttaaatatatattaacatatagactgttctgtagagcatttttggaatcacagcaaattttttaaatttagattttgatattttaatttcaggggtacaagtgcagctttgttaaatacacacacttgtgtcatgggggtttgttgtacagattatttcatcacccaggtattaaagcctggtacccattagttaattttttgagtcctctccctcctcccaccctccaccctccgataggccccagtgtgtgttgttcccctctaggtgtctatatgttctcatcatttagctctcacttataagtgagaacatgcggtatttggttatctcttcctaagttagtttgctaaggataatggcctccagctccatccatgttcatgcaaaggacatgatctaattcttttttacggctgcatagtattccatgggaattcatagcaaaattgagtggaaagtagagttctcatatatgccctaccttctcctaacacacacacacacacacgcacacacacacacacacacacacatacatacatacatacatataccctcccctatcatccacatcccccacagcgtggtgcatttgttagagctgatgaaccaacactgacacatcattgtcacccagagtccctagttgacattagggttcacacttggtgttgtacattcactggtgttagacataggtgtaatggcatgtgttcaccattatagtatcagatggaagagtttcactgctctataaactcctgtacttcatattttatttggtaaaactgaaaaccctacccataggagactttccttaagagccaagaccaagataggtcactttcctgtcaatggtttcagtagggtgcttatgctctccttatttgacatttctctgagggcacagccttgatgtgtcttgtcttcctgtggtgctctctggttcttcttttccctaatctcctgcccacccatgtttccattaatattaaagccccagccccagagcctagagctttagatgtccccagcgccctagaactggaagatgccccaggctgtctgagtattcaacaatctcttatttccctggatttatcttatgacttcattcctgatttcaggggaattcttttatcttgctactacaaccatacatgtttaagggttttgttcctttaaaaaaatatattgactctaatattcttaggtgttctgtagtgggaggatttttagaatctccagtctaccatattgccagcagtggaaaagacctttatgtaggtaatctcatttaatcctcacagcccaatgaaatggatactatttttctaattttacagagaaccctgagattttaaaaggttaaataatttgcttaagtccacaaagtaacaaccaatcttagaataataattgaataaccgttcaattctagctcttctagtctccaaagcctatgttttcacccagtttaccgcattttcttccatttctcaatatcttctcccattcaaagtagcaaatggttttaaagcttattttaatttatttagttgtggctgatttattcattgattgattgataccatgcttagaactgctgcggaggggaggccctttcatggatggcatggatgccagcattgggactggcctgtaggttaggcaggacctcagtctgtggcagtttcttagggcatttagcacagaccaaggtctggtccatagcataactggttgggagactcccttccattggtttctttggatttgatctgactctagcacaccaattcatgctagcacatctcctaagccagacttccaatgtattagttcacaatgagagagagtccttttcggtaacttgtgtccactttcccagatctttccagataccaagacaatggggaaaacacatctatgactagacatatgcttggcaggaattactgccaagatttaagtaacttaaagaaattaaatggcctttgagccatgaaaaatctggtgaaatgaacatttttaataactgagatttctaccacagaataggtcaaacaatgaacatacattgagcttatgtcaggcactgtagatgcaaaaatagctaagacctcatatgacctgcccttggggaatttataatcttggaccttctctctcccttaaacaatcctcagtcaacactagaaaattatctttcttatatctacatccagcattctgcagttaatttcagagcagtggatatctactctggacaccctctggatttccaagatattctgtgtaccatatttacaagctatcacattaggtgagttccttctttgggtcaaggttttccttcatttttggataattcttcacccacagttgtcctctgtgttctaagttctgacaatgattcttttgcttggccaaactttagtcaagcttctgaatcttctgctatgcccatcttgcaaaaattcagtttttgcaagaaccctggtaagtcagtttagtaagaacacccatgcttggtgtctgattatcctccaccatcccccaggtgacgtctgatcacccggcttctcttcagcaagaattctggtaggctggttcagctacaaccccacctcaccctgacgttccctcttagtgattttctgtccactgactcccaccctgctccttggctataaattcccacttgcccatgctgtattcaacactgagcctgctctctctcccctatggcaataccacatagcagtggtccctatacccattgcaatggtcctgaatacattctttctcactgtgatgtaacaagtgtcatgggaatatttcttcttaaacagtccacatggtattattcttaacaaccactcatatggcattaggaataaatggaatgttgttggaatcagttcagctctgtctctgccagagatttcataaggagtcgttacaaatatgttgggtttcctttatacttgttcacagggtaactgactgcaaggaaaggttccttccctgtcgtttctgcagtaatggagagtatagaagattttggttgaaaataaggcattagagtttcagaaacatgggaaaatccagggcacgagcagaataacttcaaaataactttatatttgagagttaagtttgccctaaaatgtgactgaacttttaaatatgagtaaacctaaatgtgctcactacattggggtggccttaccctagtggcttgccagagtccaaggtccagtttttattcttacagttcagtttagttgagtaagtaggtctgagacttaatatttgttttctattaattggtcaccaacactgggaatactggggcgtttgataaagtcctggccagggagaatgactcatttgtctcactcattttgggtagattggaaaggtttgtgtaatacaatacttttcatggagacaataaaaattcagatttttttctagatacataaagcattaatttaattttttaaaaagatctgtctctcagaggcctgcactaagtcctttgatgttaggtagcaggtgaaagtccccagacctgcaaggtttgagtatcatttgaaagcaagaccacttagctaaactcccactctgtgtgaagccaccaaattggacagaactgctcaaaacatagaatttcaaaaatctaataaaaatgaaacgaaagcagtcaagtatagaagaaaaaaagcaatcaagtcaagaggcaggcatggagaggctcctttctatttgtttctgatagggccagaggggctcattgcatttccctctgttcttgatggccagaccctcgtggcatcagagatgaactctccttttctattaatgactatgggaatgctggctgtgcagagaggtctctctggtaccttcccccacccagaatattctgctatcctcttggtttcagctcggactgacctggaagaagaccctgaggagaacccgggcacacagcagccattccagtcctcagcttcaagggggctcacgaaggttgtggatccttgcccagcctgcagtggggacctggtgtggcattgagtggctgtgagtgctcagtgtcccccatctcatgctaagcacagcgaagtagggggagattgcgtagtgtgctgatggagcagttgcctccacctggctgcgtgtccctccgtcatgtgacaggtgagccctgccatccagcctgtgacttcctcaggaagtcagtgccaggggaaacgtgggaaagggaaatcaggagactggagcaactttttggctattagagcttatttggcttttatcatgtatcaacaatcatctttttactaaacagaaaagaagaaggcaatggtgtttttctgtagcaagtcactatttatggaagaggagaccctttatctgcatcgcaattctgaagattccactttgttccagtcattgttgtgggcacactttcaacatttgattaagagccataagggtggcttcctccacccacagaaaaattcctctaaggaatcatgagaccgtcgacatttagcagctgtttaaaagactgtttagactcctgggatgatgatggggaattcctggaattatggtcttgggcaagaagggaactcaagtaggaaagtcagcaatctaaatttcaaacctcagggaaccttctttgtataacctgataatctccttcgctcaacacagtgcttgctgagtgaaggagtgtaatggaaaagaaagttaataatcccttgtgctctggatcaaaaatgaggtaggagaccaaattttccatcaaactggttgggtccaatcacttaatgcaaaatgcttacttcagggtctgtagcacttgttgatcaatgtacctaacaggtcttaatagagaaagtgatcaattcaagcagtgtcttcccaaattctatatatatataacagatattgctgcataacaaaccagacaacgcttaatagtttaaggcaaccgttttattattccccagagttctatgcgtggaccaaggtcacttgggccctagtcttgtgatgtcacttggaccacagtcattgggaggttcaccaggtggaagcctccatgacagctcaatcccatagctgccagtgggtacggcacctacacgtggctgcttgtatggcctgggattttcacagcacagcagcaggggctgagaggcagagtcctaggagtgattgtccccagagagcagaagcaaaagctctcatcagtcttctaagaggctgagctgacaatgggcacagcaccactctgccatcatctatggcttaagcattcacagggccaggctaaattcaggctgtcggaagataaactccacctctcaatggagagagttcaaagcaactgtggccatctttaccccatcagctttcttgccaagaaataaagctctacatgacacatcaactttcatttatttaacatttatctcaaaagacatgagttaactggcaaataatatcacattcatagtaaaagtctaagaaattaacatcctatacttattgggcattgtttactttctatatgtttttgttttgttttttgagacagtctcactcttgtcgcccaggctggaatgcagaggtgcaatctcagctcattgctacctccacctcccacattcaggcaattctcgtgcctcagcctcccgagtagctgggattacaggtgtgcaccaacacacccagctaatttttatatttttaatagagacaggttttgccatgtgggccaggctggtcttgaacttctggggttaagtgatctgctgtctcggccacccgaagtactgggattacaggtgtgaaccactgtgcctggcctatatggtattcttaaaccccttggttgagctttggccatggagacttggaacagaatgttaggagctttacaggccacaaggacaggttggttttctgggttcctgggcacacagcctaactcagaagaaaataagaaacaaacatgagaaaaacaagccagaaaaacctgattcacaggaggcgtgtcactgagttgtacttagtttatataaagcaatggttctcttcaaactcttagtctcaggactcctttatgttctcaaaaactgaggatctggctgagcgaggtggcgcacacctgttctcccagcactttaggaggccaaggcgggtggatcacttgaggtctggagtttgagaccagcctggctaacatggcaaaaaaccatctctactataaatacgaaaattagcagggtgatcatggctcacgcctgtagtcccagctactcaggaagctaaggctggagaatcgcttgagcccggaggttgaggccacactgagccaagattacgccactgcactccatcctgggtgacagagtaagaccctgtctcaaaaaaaaaaaaaaaaaaaagaaagaaagaaaaaacctgaggatcctatgcagcttttgtttctgatggactagttctactaatatttacaatactagaaattaaaattgagaagtttcaaaaatacatattcactttaaaagcacaataaaaattccattacataaattccatattgttatgaaagtatctatattttccaaagccccaaagacaatgagtaggaacgacagtgttttggtgttttgcaaatctccctggcgtcagggttaatggaagacagctgggctgtccttatctgttcttacatttaggctgaatttgttacaatgtgttgccatggctgaagtagaggaagaatgtctggcctcacagaagtatggaagtgtaaaaaggaggagtatgtaagcagactttttagataatagcaggttagcttgagtttcttgacaagtgtggtttcttactggttaggtgcactgtagaatctggaacagacacctgaacgttctttaggtgacttttagggatgttttagctcccctgccacctggggcccacagggagacacccagggacgagatctctctgagccttgaagacatttgcagcccagccctccctgctccttcctgcttgtctaaaacttcgcaattctgtgagatcatagacaaattgcatctcttctgtgaaggctgctctcaccttactaaacaacaattatctcttacttttctcaattcaaataacgttattgtcggtaccactcatttggcccttagtaaatgctgtcaatttttattgattgattgattgagatggcacaatctcggctcactgcaacctccacctcctgggttcaagcgattctccgacctcagcctcccgagtagctgagactacaggcgtgcaccaccatgcccagctaatttttgtatttttagtagagacggggtttgaccatgttggccaggatggtctcaatcttttgacctcctgatctgcccacttcagtctcccaaagtgctgggattacaggcatgagccatcgtgcctggctgatgctgtcaattttaaattaattggcagataaccacttgctaatttttaattaagctaattgaaaacaggttcttcaatgagaacacttggacacaggaaggggaacatcacacatcggggcctgtcatagggtggggggaggggggagggatggcattaggagatatacctaatgtaaatgacgagttaatgggtgcagcacaccaacatggcacatgtatacatatgtaacaaacctgcacgttgtgcacatgtaccctagaacttaaagtataattttaaaaaaattaaaaaaaaaagaaaagaaaacaggttctcgactaatactttatttatttatttatctatttgagatagagtctcgctctgttgcccaggctggagtgcaatggcatgatctcagctcactgcaacctctgtcttctgggttcaagcgattctcctgcctcagcctcctgagtagctgggactacaggtgtgcacaccaccacacctggctaatttttgtatttttagtagagatggagtttcaccatgttggccacggtggtctcaatctcctgacctcgtgatccacctgcctcggccttccaaagagctgagattacaggcatgagccaccgtgcccagccggctaacacttttaaagtttgtttttcctacagcaagcagaaaaattgatcggagtttcttaatctggggttcgtggattagcttattgggggcccatgaaacccccagaacttgtaagtgaaattgtggatgtctgtgtatatatatcattcttcagaaattttactcctcctttccccccagtaaaaggttagtaacaactagactagatttttttttttgaaatggagtctcgctctgtcacccaggctgcattgcagtggcacaatcttggctcactgcaagctctacctcccgggttcacgccattctcctgcctcagcctcccgagtagctgggattataggcgcctgccaccatgcccagctaattttttgtatttttttagtagagacggggtttcaccgtgttagccaggatggtctcgatctcctgacctcgtgatccgcctgcctcgacctccgaaagtgctgggattacaggcatgagccaccgcgcccggccaactaggctagatttttaacaaatatatactgtggtcttttttacagtttttaaacccaatatctgctataatgggatcagaaaaggccacatctataaaagcaaatccttcctcgattgtgccagggggctttagttccctctgttctatgtttacattggagtcccaaccatctggttatttttgatattccaacatagtctgtgttgggaagggagttcttattctgtttcctcccatgcacgcagcggttagtaccagggaagcaggacaaatcactgcagcacttcaggagggaacctctctttgtgctcagaagcaagatagcatccaactcagggtcagcagacgtcttcggtaaagtgccgagagtaaggattttaggctctgcaggtcttatgttctctgtggtgatgactcagctctgccattgctgcgcgaatgcagccacaaacaggaaagtgagttggcccctcgcatccaaacaactctatttacagaaacaagcaggggctgcatttggcccatgggctggagttcttgaacctctgatctaattcacagctcactaggacgcaggagttatagttgtaataaggaagcacaacatcaaaaaattgggtggaatcctggggactcttaggactttgcattccaccaatcataggtaattctagtcttggctaaaagggagcacacaaatccagagaaacctgctcatcccaggcaatgggccagacaggcagccctgtgacacaggcagggaaataggggcagttttgtggtcattgctccagtgctcacataccttctatcagagacgattaaaaaagttattgtttacaccaccacaaaccagagtgcaggcttgttagaaaatctggattgctccctgatctgcctctctataattagtgaacctttcttctctgctctgtgcacacaatgaataaaacgttcatggtgtatgatgtcaccacagtgctagaaacactgtcttgattgttccacttttaattctgcctttgcgcctggctgtggctgcagctgctggtcatccctctaccagctactactcaatttaccaacctggtgttgacagctctaccttgcagactttcgtggcaggaagaaagcctggtgggaatggacatggtagggagagcctcagtggcctccttcctaagagagcacaaatatagtggaagcagattcgcagcttctcacaagtttaatctttagaatgtgcagaatcagaattctgcatctggcaaatcagaatttaaaagttggcaagcgctttgacttatttaggtttcttttattatcaagttcataaaagggcatttttctttctcactctcaataggaattcttgggcctcgaggggtcgtttcttagttcttgctctggttgttcttccttttgtctcttgctgttctgtggactggaggggtccataggttgtgagtttctttttctgccttttgtaagttgccatttgttctcccaatcctgcatgtgactggggttgggggaattctgtagttggctttgtgcattgttttgtgtaccagaacttggtttaagaacagctatcaatgctgtcataatgataccacatttgctccaggaaagcacactttcagttacctctagcaccgtccccaccaaagacaggctgagctctgatcttcccttcttgggccactcactcctgtgtatggtgagggcctttctgagtggtggagcccaagctgcatgcagctgctctagaagcaaggaagactgaagccgggcaatgtttggccaatcacaagcaccgtttggtgaggtgagcatattcagatgatcattttaagtagcagttcctctaaaacttccactaaaggccattcagcagaaatcccccaaacacagacaggcttgagatgctgggtggccaaaccaaatggcgagtgccctatgccagcaaaaccagagagagcgttaagtcagggttctggcctggggaggagggagatgacctccactgagtgctctctatgcatccagctctggacaaaggccccgtgtgtctcacaaacctggtttttcaaatcaggaaatcagtggcttgagaagtttaaagtcctgaggcctcccaggtggtacatggctcaaccaacagcatctgtctatatgtttttaagagcatgacaagtagtcattagagtatggagtgtagaaattcacagcaccgcccttgacaggaaaccaggtgtaactacacttttgtgttctacagacacacagatggggttggagaggaggctaccaccaggacactgtggacattggaaggcaagggtaaatagagtcttggggtcccggggagacacaggggtccaggacacaaagcctgccaagcaccaattttgtaaagttcagttttaatgaggagaaatgacttgaggagaatccaactaggcctcctctcctgtggatccaaattgtaccaattgaaagggggaaaagggtcgcttcaaggcaccccaactttagattttttagtagtctgaggctcttctcttcagcttttgctgattgtttgctgtcgttcctttataaaactcttcccagtttttgaggatacagattgtggttggcccaacacaagcagcttttgctcaggttagagcaccacgaactcaaatactgcagttgctgcccactgggaagcccctgggggagactcggagactcagggggaacgaacaatgaggccaggtgctggtgggtcacatggttacagctgcatgtggacaagcacaattaaggcagttttactgtgaaacaacaaatacagcaaaatcacaatgcctgcctgtgctcttatctataggaacattgtgggatgggggtaggatgtggctgaaatggtgcagccctatccacttagcttgattcaacccacagtagctcagaaccacactggaaaatgggagaagcttgtttgttaaataaaaggtggtgacatgttttgaagaatctcctggcaatttaattgttatataagttatttggatttttaacaaaggacgtttcaacctgaattttacagataaagggtttttgtttctctctctttcaagctcattttccctattgacaaattttgacccaggtcagagtagcataatccatgatgcctatgtccaaattaaatgactcagaatcagaatctcacatgtaaatagaaatctcacagggtgtgaaagatatcgtcatataacagataaagctaaacaaaatgtcagtatcagttttatcaaataccttgtaggtcaaaggttaaacgatgttggaagcacagataaacatgcagttgtgtcaggaaccatggtgatgttaaggaaatgttttcttttcattctttttcttcttagtgggaaaatatctatcagaaagtagaaaagaagggaggtgagggctgggctggggaaaggcagttgtcaggatgagtagtggatcagggcatcccatttattctcactcaacccaggagaaggtcacacacaagccatgtctagaaggaaggtgggaaagcgtgagacaggtaagggaaggctggcctcagccgagcaaagggcagagaagacttggccaccaatggaagctttgcaaagagcaggtggaatcagagtgaggcgtaacggtcaattggaatgtatctgacacacagtcctcgccttttcctcatgctgttcgaaaaatgttgcctaaagcctgtttagaaagtgtaccagggaattccttgctcttggtttgtgtggggcacagaggcagccacgtgtgtcacatttcaaggcaggtggaccaactctaggggcagcgcaagctcccttcaggcacatttgctgagaaagcgcggtgtcctctgtgtcacgggagcgttggctatgaccacctagtgtgggttgtgagagagaaagcagggtccagaaggtcgttctgtgtctcttttcttactcctaaatcttagggagatactatttgccctgaggctgatagataagctccattggtttcaatggaaatgttcaaccctagctgaatgggagacacaggaaaaattaacataaaatgtaaaagttcaagttggaaagccaatgatgcagttctagcctttgtggaaagatccataggccgctttctgagatgttgcgtgttcacagtgcttctgtttccaaagcaaaccaggctgctgtgtgaagccattggtgccgatcctcacgagtcactgagatcagagacacaagtgcacgtccaccaccgtggactaactcacatctcagagacacaagcgcacatctatgcccgtgcgcgaactcacttctcagagcactggctcatgggcggtcagctggtgtattcattaccagggggtaaaccttactgaactaactcaaaggggagagcttctcaaaatgcattgtgcatgcatataattgggagagcttgataaagacagaaatccctaagtgtgaatcccagagaggctgcctcacttggtcagcggtggagcccaagaatctgcatcttaccaagctctcccagttcattctaacacatgtggtctgagaatcgcatgttgagaaacaccaggggaaacgtgcgtttaaaaatagttcctcagacgcctactgtctgtttagatttacagttgatagaatgatgcaaatgtataaaaatacctccgtaaatatatcctcaagtggcctgggttgagaatgaaccctttcgcaatgtgtgtcttagtgaataatgccagtattggctcagttgagtggaacacacacaaactcattaaatttcaagtgttcgtttcaggtgttggcgaggtcacatctctccttcagcttaggtcacatagaggaacatcagcagcgggtggcctcggtgttctccgcaccgcctctctggcttggtggtttatcactcctctcccttagctgcctcgccttggacatgcgtcttggctatgacaaacatgcaagggattgcgtggccaagagtagtgggttggagcctaggagtccaggtacttatgtggtggatgctacccttttttgtggtcaaacaccacgtccacttctcccatctcagcagcactggtccctgcagcttgatggattgggaaatcatttgtagcaaccatggggatactcaggaaaagaacactgagaacattgcacctcccaggttctggaccttgattgatattacacacacacacacacccatgaacacacacctctgtgcacatgcatcttgcacacccagagtcttgagctcactggtaatctccagcttagaattcaccattgtcagcttggagaaaacaacatgcttttctggagagtaaaggcctcagtgaatctgtccccaaattgtatgtctctcgtaactttgagggaatttttttttgttgttgacagccttatgccaaagggaaaggatgaaatattgggcatggcctgctggtcgtgaaaggtcacattctgcagcatgttttcccgattctgtgctgattcatcacacactgagattttctattaaatacccttcctgactctattggaaatgactgtaagtggaacaaatgaagtcaccctcaaaataaggactgccaggggaggggtaggtggcaactttaactgctccccaaccttgggaagtggggttagtttttttccattttgatggtgctgcttggaggtaagatgatggatttacactggtggagcattttgcttttcacagggtgctctgagcaggaggcggtcagggaaagtactaattctgtttcttccatgttgagaagctaaagcccggaaggtggagggctcctgccctggctggggagtggctgcctgagcctggcccggggctgctgtgctgcaagccacaccacagtgatggcctggtgggcctctgctgcctttgtttgtttgatttaatttgtttttctttctttcttttttttttttttttttgagacgtagtcttgctctctttccaggctggagtgcagcagcgctatcatggctcactgcaatctccacctcctgggttcaagcgattctcctgcctcagcctcccaagtagctgggactacaggcacctgccactgcgcccagctaatttttgtatttttagtagagacggggtttcaccgtgttggccaagatgatctcgatcttttgacctcatgatccgcccacctcggcctcccaaagtgttgggattacaggcattagccactgctcctgtcctgtttttgatttaattttcagttgacacatgataacgtacagggtacagtgtgatgtttcaatacatgtttacattgtttaatgatcgaatcggggtaattagcatatccatcatctcatacttgccatttctttgtgataagaacattcaaaattcattcttctagttattttgaaatatacagtacattattgttaactatagtcatttgcaatgtggatgaacctagaggacattatgttaagtgaaataagacaggcacagaaggacaaatactgcgtgatcccactcatatgtggaatctgaaaatatccatctcctggagacagtaaatagaacggtggtttccagaggagggggtgggggtgggggtaggcagagtgaagagaggttggtcagtgggtacaaagttacagttagataggagaaataagttgtgagccttttaaaattcaaaccctccctttcttcctttattctttcgtgtttcccttgaactccctctctaaaaataaaatccagggcggcggagtttgtaagattttcctcttacaatgacatttttgaaaatcaccctatgtataatttatatcactcattgccaatccttctgacaaagttgtatgtttctgtggcattcttggaaatttgtacctgaaagattgtcttctttgaataactgatctatttccttttatcagataagatttatgttcttcttgtcttccagaaagcttagagctaaatttaatattcgaccatgacctttgtattatgtttcttccctttctatgaggttttaaaaaggtctgcattttagccttattttatacacaccttttagtatgagccaaagtttttggaaacaggcattttgcataaacatttttttctctcagtttaaattgctgcgacatgaaaacatcaaatgccctaaacaagctaagattattaaattcaattaggtaggtcacataatacacgttttttaaattgttacaaacattgtagagtaaatgttgttatggaagaaatttagtatgtaaaatgacactgtaaacaataccaggctcatgacaaagggtcatgaaataaaatcagtcctcaagggaagtcgagaagttcaacggaagaatgctaaggcttcatttttgttgtgaagaatcgccaagcaagtcctataaaatacatgggaaaagatcatgtttgccctgcagagagacacaggctgagccacagggttgctgggatttgttccaactgcaggctctcggcctaccaggctgccttcctcacctcctcatggtcaggtagcaggtgtgtggtctcagatgaactgattccattctgagcctcatttccctaatctggagaatgggatcatagtacccacctcaatgggcaatgtgaacaattaaagtgatttgtgagaagggattagcacagtgcctggcacaattttccttcatatttgaattctactaccttgtaaaaaatacaaagcattgcatgttctgtttcataataaatgctgtgcagaaccatgcgttagatttttttttaagtcttgctggagtgtatcacatatgcagaaaagcgtctaagtcaagtgtgtagccgcctggatttttacagtgaacactcatgtactagcatttaggttaagaaacagcctcagaaatcctcctcctgtcacctcctagtcaatttcccatcctaggaagttacccactatcctgacttctaacaccatagatttcttttgcctttttttttttaagagtcagagtgtcgctctgtcaccaggctggagtgcagtggtgtgattatagctcactgacacctctgactcctggggttcaaatgatcctcctatctcagcctccacagtagctaggacacactgccacaaccagctaatgtttaaatttattgtagggatggagtcttgctatgttgcccaggctagtgtcttgcctgtttttgtgctttacataaatggagtcatatggtgtgtactcttttgtgtctggcctctttcactcaatatgtttgcaagattcatccatgatgtgtgggtagcaagagtttgttattagttcctgtagctgtatagatgtccaatgtataataccgaaatttattaattgtactattgatagaaatttgggtttcctgtttgaggactttatgaataaagcttatatgaacattcttgtacatctttggtaaacatacacccatttctattggatatatacctagagatgtaattgctttgaaggtatgcatattgatcagtgtaatcaccagatccttcttgaccactgcagagataaaatcagttcactgagacagcggtattgcagtagagaacaagtttaataaacagggctagccaagcagaacaggagtttattactttattactcaaatcagcctctctcagaactcagaggctagtctaggtaggggtttcatggctaatttggtgaacagcaggctagggaatgagtgctgctgattggttggggatgaaattgtaggggtgtggaaaatggtcctggtgcactgagtccacctcaaggcggggtccacaggactagttgagtcatgagtcacgggtcaggtgcagtcattcatttgccagaatgcagaagtctgaaaaacatctcagaataacaatcttaggcaatataaaagtagtgttatctataggaacaattggaaaagtcaccaatcctgtgacctctggccacatctcctaagaggcaaggaattatagaaaagcaagccagagaacagtggctggttatcatttaagcctacatgttagtagaattcagacctctcccaaaatcctaatcttgtggccctgcattcattttacaaaggcagtttcggtccctgagcaaggagggagttagtttcaggaagggactgttaccgtctttgttttaaagttaacaaaggcaattagcttgtgagaatagaagcaagatggaattagttaggttaaatttctcttactgttacaaattttgcaaaggcagtttcatcagctttagtaaatcctattagttttccaaagtggctgtgccaatttatactcccaatatagtgtgggagttcttctttatcattatcaatccttagtattttatctctttttcatgttggctttttcacttgtatcagcaagggctctccagagaaacggaaccaatagaatctgtatagatatatggaaagagacttatgatgagggactcacccacgtgatcatggaggctgagaagcacaggatctgctgtctgtaacctggagatgtgggagagctggtgtagttcctgtctaaacccaaaggcctgagaaacagggaagccagtggtataggtcctggtccaagcccaaaggcccaagaaccaggtgcgtcaatgtctgacatcccagggtaggagacagatgtcctttttgccaaggtcactctccctgatgcctttctgttctattcctaccctcaaaggattggccaacgcctcccacattagggagagtgagtctttactcagccaggtgattcaaatgctaatctctcccagaaataccctcaacacaccccagaaataatattttacctgccacctgggtatcactcagcccagtcaagtggacacataaaattcactatcacacattatggtgtagtgttgtctcactatgcttttaatttgcatttcccagatgactgttgcatttttagcattacgttatattgtttagaaaataagatacaatataatatacaaagcaacatgtaactaaacatataaagcaaaagctaataaaaatatataaacagaacttggtaaagcacaaatataatgaatgattttaaatattttcatttaataatttagtagatctagtaaactaatcaaggatgaagaggatcttacattcataatttcgtgtaataatacatataaaatttacatcctacaaatatggaatatataactttctcttatttttttctcctttgtactttataaaatttctaaaattcagttaggttcttgatgatgaaaacatttcagatagttcaggaaagtagagattttagagtcatcagtctctgatcaaaattaaaaaaaagataaataaattgtataaagacccaagctgaaccgtttaatatcagagtgcactctcataaagtgtccctaaagcaaaggagaagtcaaggctgaaattccaagttaaagaaatagtaattcaaactagaagaccttgtagcaaatttatcgcatccaggaaaagttgtatttagaggaaatagcttcagataacttctttattatagaagaaaattaaaactacaagttagaattcatgttaggaaactcaaagaaaaaaatgacaaaacaaaacaaaaggacctatgaaaaggaaattaattgggataggaactgatattaatgaagtagacacaggggctaccaaatggttacttaaattcaggattaaggttaaaaagataagaaatgtctaaagtcttctaaccctggacatgatgaggagcctagaacaagtgtattgattctccagttgttttatctcctttgctgtaaaatatgaacaacagcagcagtaacaacagcaataccgttgtgcccagcatgacaacattttagtcactgatgcctcgcctacaggacagcagccccatgacattataataccacatttctatgccttttctacatttgggtgtgtttagatgcacgaatacttaccattgtgttacagctgcctacagtactcagtacagtaacgtgtgcaggtttgttgcctgggagcaataggctacaacgtgcagcctcgctgtttggtgggctacattatctaggtttgtgtgagtacgctccgtgttgttcacacagcaacaacatcgcctacatttctcagaatgtagccccattagtaagaaatgcatgactagacctaagaaggtgttggtggtcacagtaacgtttaaaatgtaacatgctgtaatgcaacttaagcagtacatgcaatatctaggaggcctgtatagggagtctgtaatatacatgcaatgataccaacctcaggctactaaaaacacgaaactgatgggctgtgaagggagtggatgatctgtttgtcagcaaggcatgtgcaccacatgtgtaaatatcctgaagaaagtacctcaagtgtctgtcatgcagccaacagacagtatctgcagggccctttacaaaccaggaagagggaaatcggattctttccatttgcagacattttcagactcgttctttctttcttttttgagacagagtcttgctctgtcgcccaggctggagtgcagtagcacaatctcagctcactgcaccctctgcctccccggttcaagcaattctcctgcctcagcctctcaagtagctgggattacaggtgcccaccaccacgcccagctaatttttgtatttttagtagagatagggtttcactgtgtggccaggctggtctcgaactcctgaccttgtgatccacccaccttggcctcccaaagtgctgggattacaagtgtgagccaccatgccaggcctttcagattctttctgaaccatctggggaagtcacagtattgataatggccatgaatttatgagaaactgttaagtataatagatattaaaaaatagaaagttgatttttagttggtaacaaaagactaaaatctttaatgcactctagttccttgaaatctgataatgctgacgagtcagtttccggagccaaatttccccgcttgactcatcctcacaagaaatcagatatccttgttataagaggagagcatcaacacaaaacaaaaacagcacggatgggctgcctcatgctgtataggattcgagacccaggagccatagcttaggggccactgtccctggtcaggcacacagacaggaaaggaggagggacccagctggcatgtggctggagcagcacccaggacacagcatggcagctggccaggtctcagccctggacaagaatccacaagaggcgaaggcattttctgtgctgtgcctcagccagaagttccaatgcagggatgtggaggcattttctaaaacttgcctttgtcttgctccaagtgcaggcaccatgcataatgctgacgagcatggtctgtgactcccgcgctggcaggactttatggccaaggtgcctcatgccacccaccacgtgtggtagtggcagtcatttgtgtaacactcagacacccaaataaaggggcaagcatcctaaactggtgcagctttactgtcctgggaggccttacccacttctcaaaagaatgtgctatttgctgacttcagtactaaaatatctgagttgtgttacctgagggttttccagctgtttttgcaggtgagtgtactgtgagctaagcaggctatagacccatatctgccatccaccagctgggtagctgtgggagcacctctttccttctccggatttcccccaccttttatgaatgtcactgagcaaatgaactccaagtgagcactgctggggctagcctcctgaagtttttggagaccctagttctgctccccagtctccacgcagcacataccttgttgcagtggccacctgaccttccaagaggacatgaacagcaggaagtgatttccaatcacgttggacatgctgtgcctgcagccggcaggacttcctggtcctggcatttcaggtgaatgacccttgtctggggttgaagatgaatcttccccaggtcctcttaaggactgcctggcatccctccctatctcctttcagccacaccaggtacagcctgccaggctctcgcctccagtttcacacatccttgcacctgcctgggcgatggcacttgggacatactcatgcacacccaacccttaggggaggagattatgcccagtgggtggtccatagaaggaagccagggagtaaatgcttcctccgtctccctgctggtctagtagagtggagccagcggagacaatgctccctgtttggggatggaggggtggggacttaggggcaaggggaagctgagaagagattacacagaggagatgatatgaggcgaatcttcagaggtgggagctttaggggggaagtggtagcgattggagtcagaggcagcagtgctatcaaaagtctaggctgcaagagcctgctaagagttatgttctccagggcagggcagagggagatgcccaagggacagaggaggcagtggccgccagcctggggtcctaggagttccccggcacctgttcctcctcctcagccccggcccacccctgcagctcctcaccaggttcagacgtcctggctctggtcctcccacctcatctgtgcaccttgccagtcctttggcttcctctgcgtgcactgaagccctaccagctggtgaggagtccctgtgtttggacgcagggtttggcttcttacaccagcatcctgtgctgtgtccaggctcctcgggtctctgtgcttaacgcaattccaaatggaagaaagggaggaggaagcacggttctcaagaatcgcaggcctcgggcacaatttgagctccaagtctttatttcttggttatcactaagaatcagttgcatattagaattctgaataggcctggtgcagtggctcaggattataatcccagcaatttgagaggctgaggccagaggattgcttgaggccaggagtttgaggtcaggctgagcagcgttaacgagatcccatcgctacaaacaagaacaacaacaacaaactattatttaaaaaataaaaataaattttagaaaattcagaatgaccaacactttcattcagggttctaactattgataaaaagaaatatatgtttttttttttcttttaaacccatgatgtgagacattaatgttctgggcagttgtgaggaatctccaccacagcacctctcctcaccctcccgtttccagatgaaagccaggctgtggatactggcctggtgacaagagaacatggaaaatggaaaggatgtgagtttaaggactctttggacacagtagagtgtgtctaaatttctcaataaaaggcatattttataaacagaatataaatattcagcatcctggccttggacccacgactgcgttcctgtggcgggaggcagccagcagctcaggggcccgtgcagcacttccccctgccgccaggggatcctccccgccactgtgccctgcccaccacattatttatactacatgtctcatgctttctgtggaaaattgtttcacttagcttcctgcagggatattttgggactgggaaccttggcttttgatttttcctttctctaccttgcataacagctctaattcccaattctcttggattttctcttctctcctgctgctctttgggctgaaaaataggaattctcttttattgttttgtttcaattttctgagacctatccgtacctagaacacaaacttgtttttctccgtgacattcttgttttagatataaagcatcaagtatctgagcagcaagaacatttttgtgtacttgcattttataatcgtggaattcaggaaaggtcttgcaggaggtaagttagcatagagtttcagagctaggattcggcctcagtgctgtgatccacaaaggaatgtgtaatagaattcggaaaatcactgcatttgatgcaaatatctagtgaactctaggccgctaaaacttctcaaccactcattccatggctgattcacgtggagttcctgcataacaaaattcgggtagaaatgatctacgagaagtaagtaccaacacctcctattggagatgtgaaattgagcaagccgttcttacctgggatctcagctttcttacctggctagaagtggggaggttgaatgcacttggtatctaagcacccttatagacttcccttgccacctgggcccacggtgggagtatttttctctatggccactagatgtcccaggagcacccactttggggctgagctgtctaagacacctggggctccatcctgtcgtccttggaatctgctgacgtgaggaaggcaatgtttgggtttcacttctgtatgattttggggctgctgtctcagccactgagactcagacaagaattttaagacaccaaaacaaccccttagttttcttgatggctgtttgaaaccaacagaaccattcacattttcaggaatggattcttgttaatgccatgaagtaggaattcacaagggattttccaaacattagtgaactcacaaaggaagtgttattatggggtgtctatgtgcttgaggcatagagagtctgtaaaaatgagagagccacagctgcctctgtgtcgttggggtgacggaggctcctggacagctctgccctgcggggacactctgaagaacaggcaccctgtgctcagggccaccgtgaaccatggagagggcagcatggaggaggaggtgaagaagcccacaaagaggagtcaggtcaaggacaccatgagagatccctcgtctgccacttccaaggccagaagcccggagttcccatcacaccccacagcaactatgcagtgtgagaccactggttcatttagccaggaaaagggaagaaatctttcagggtggatttaaagagaactgcaaatccatctgcagccatcttagatagatgaatgtgaagtttaacgaaattagctctgtccaagtatccaagtgggagatttccaagaagccatcactaaggctactactggcagtggcagtggtggcattagaaatagcagcatgcccagagataactttccaatttagtgttaggggaaattgtatgacactgcaaggaccatattgtaagcttagctgtctaatgtgcaaaccagatacgcatttttagtttaaattaactttgacatgtagcagcaattcatagttacccccaaaacacaaactctaagaacttttaaaatgcatttaatagaactctaaagagtacagaagagaaaatatgtgaaatataataatagtagcgcaccgttaatttatgatggttcttaaccagtgtgtacaggtttaatactacctcacaggagaaaaggttaaggaggatatgcatttttcacttgtatataaaatggagaatattcattttttaaactggaaaaatgaattcagtcacttatgaagtgtaacctcttctaaaaaaaaattgtgtgacagatcatacaataacagcgctcacttcttgtgatcatatgtcccagcatttaaacattaagtcaatttagctagctacctttcagaagctggttattatgactattattttacactcataattcaatttttataaacaatataatgccagctgctgtaattcaaactttatatgccaatgttgtgccctgtcatattttacattctgagcaagcctacagcctccagcagcctgaaggttgtacgctttacatatatggcacagagcgatcagcctgcaattcatgtgcatatttgttacaaagcatgtgtctttgtgaaaatcttatacacttaaatgacatcagtttctatcttgttgttgttcttaaattgcttccccagtcctctccttctccttcagtgttatagatgttatgtattcatcctttcattgcgggtacagtgcatcgtgtaagatcccagatgcaatcagcatgcctgggttcaaatctcgaccttgtccttttctatctgtgttttcttaggcaaatatcttaatttctgtctgcctagggagatggaggatggtaacaggacctaccttactgaactggtagggagagtaaatgagttaaaacatgcagaggtcttagaacagtgcccgaagcacctttagtaaccatgcattcactgagaaaccatgttttgtgtgttgctctaccaggcacagtgctaggctgcagggattctgggatggtggcaggaaacagaagtattcgagaacaagggttccaataccagctctcaggtgctgtgggactttactcgccaggtgcctttggctaagccacccactttcctaggtcctcagtgttctccttgaccaataataaagatggaatagacaatctcaaaattactttccaactctgaatattcttggatgtcctaattctaagccaagtgggctctgtggaaatctgctctcattggccgaggagtccaatccaccaccgcacgggtccagaataaagtgaccacgctacattagacaaatggcgttggcaatgccgtgcctttttatggaaagtggttttggatgtttgtgatgcaaggagacatgaggatattccatattagcatcagtggttcaagtgacttggagagtatgttaacaacaggctttatggatggaaggagccaacacatttctccatgaaaagtcctctaaaatggtagagctcatggttatgatagaaagatgggatgaagggcacccctcagaatttcacagatgttgaaacagttgaatagaggaagtgagtcagtttgtatcaaatgaataaataggaaaagttaaaactagaagtgatgaaggaatagaacaaagtgtccagaacagcctcagtgaatatctactatatgtccaccttcaagtgcattaggacccatttagagatgctttggaagttttggaaaggggtggacaggcaaaggttacacatctggttaaccacgtagatctgcatttcggcttttcaagtagcaaaaggataaacttacctttaggcttgttattccatttccatacaagacatatgatggattagatgctcaccttacatgctcccatggacctctgtccttctgtcctaagtgtcactgttaattatatgtttgactgtttcttctcttctgcaatgtaaattccatgttgtgtgaattgcctactgctgcacccacagagcccagcacagtgtctagcacataggagggaatatatatgcatggatatatgttgagtgaatggaagggatggcttcttcggatggccctgccttcttagctgtgaatacatgatacatagaaggctgtctcttttggtggctttgttttttgggagaggaatgaagaaaagacaagtacgttgctgtgcgtgtctgataagatttccaagctgatcgggccacaggtccaattctgcccctcacatcgtcctgcacataaaaagggagtggccttccttatccttgacagggcaaggggaaatggaacttctttttttttttttttcaatgaatggagatttattaggccagctttagggcgtttctgggaaaaactcgagccacagacacatctgtggctgttttctttctctctctctctctctctctctctctttctttcatagcgtctggctctttcttttttttttttctttttttaaaaaattttattattattacactttaagttttagggtacatgtgcacaatgtgcaggtttgttacatatgtatacatgtgccatgctggtgcgctgcacccactaactcgccatttaacattaagtatatctcctaaagctatccctcccccctccccccaaccccacaacagtccccggagtgtgatgttgggaaatggaacttcttaatctcggccacttctcggcctgtggcgctttgcactcccactgcagctgtcggtcctcttgacaaagtcctgaattttccccctctatctgcagaggggtctcttcagttcacttctagtgaggtggttttctgatgctattaaatggagcccctcagggaagccagtgttgacagggcattttctgagtcctgtgactgcatccatatgggactgggtgatgtgggatgttctgcatgaatgtcttatgaccaaaggcactgaaaggactggtgcagggctgggaatttgatttaccttgttggggcataaactctacttctttgttttctctccaccctacccctatccccaacctccaaccgtcataagaaatgttacttcctgaagacgggcaagcctggccttttggaattgccacaccgtatatatgtgtgatcttttctctggtctctgagcaccttgaccctaaaccaacactgcagtcaggtgggaggggaggtacagagcccagccttccccttggaggtccagggaggactagtgagaggaggtcaggctaagagagactccagattcccctcctctcttttgatttcagcagctggtgtggaaactcctccccacgctgccctaactccacgttattatatcttcactccaaggatgctgtggcagtggaccatgggatgcagaaaggagatgttcatggccaaattcaagcctggcagtgtcattcctgcttaatacacccaacgcaagatgagctcccatctggccatgctgtggccccacacctgatcccacattggagtgttatgtctttgtatttatttacctttacataattatgaggctacataaatttagttattgctggccatgaaaccaaacccagaaagcttacataggatgacgtcttttgatcgtaagtggaaggaaggattctagtgttgaaaactctctacgtgatattgttatctgggtatcagattagattaacaatggtaatagaaaactcactcacctgattcagtcactgtttaaacccccttaattatatcaactcatttaatgctcaccgtaatcccttcagcagggaattctgatatctccattttatgactgagaaaattgaggcaaaatggaaaagctttagagtttttgccttgggtgattactgtatacgggacaaaggaacagctcacacatgtgagactcatctgtatgtcatagggctacacattacttagaataattgattacctgattggagattctagcagaggaaattactaacttcataactttcttggtgtgaaactcatggcttcaaaacggtctacataattatgaaattcagataatttattagttgcttatttttaagtttgataaaacttgacagatcagtgaataatcgctaactattggaggcattatctaattgttctttcttatgatttatgttgggagctatagattcactggttaacctgtcaggtagcaagatttatgtttacacaaactttccagagtgtcttcaaccccacggaagttgtctttgaacatcacctttcttggacagctgtgcatttgtttaccccagtaatgatgccaactctgtctcatgtagacctgtaagctccaggacaagagccatggtctgtgtattgttttttgttttgttttgttttgttttgagacggagtcttgctctgtcacccaggctggagtgcagtggcggaatctccactcactacaagctctgcctcctgggtttacgccattctcctgcctcagccttccgagtagctgggactacagtcgcccaccaccatgtcctgctaattttttgtatttttagtagagacggggtttcaccgtgttagccaggatggtctcgatctcctgacctcgtaatccacccccctcggcctcctaaagtgctgggattacaggtgtggcccactgcatccggcctggcctgtgtactgttgtaacctcaccacccagcacaactcttgggacttggtgaatgtcacaaaaaaaaaaggcttgtctttgatctctcagaagattgttctcagtactaatgtagagggagtgccttgtgttttccacttgatttccagtctcactggctacacttgaatccaaataggctttggctgtattgaaaagacagagatttggcactgccaagtcacttacactaacgcttttgtttctgaggtggaatccccaaaggaggaagacaaaaacaaaacattttggagaggctattatatgctgaggacagatactttcatttccattatctcatttaatcctgtcattagtgctttcaagtaagtataagtgtgtccattttataattgaaaaacctagtgattcttgcacactgattttgtatgctggaactttgctgaagttgtttaccaggtgaagagctttgggcctgagactatggcgtttcctggataagatcatgtcgtctgcatacagagatagtttaacttcctcttttcctatttggatgccttcattttcttctcttgcctgactgctctgaccaggacttctaatactatgttgaataggagtggtaagaggggcatccttgtcttgtgccagttttcaaggggaatgcttccagcttttgtcttttcagtattatgttggctgtggttttgttgtatatggctcttttattttgaggtatgttccttcaatacctggtttattgagaagttccaatgacattcttcactgaactagaaaaaactatttcaaaattcatgtggaatcaaaatgagcccaaatagccaaggcaatcctaagcaaaaaggacaaagctggaggcatcatattacctgacttaaaactatactacattttttggctagagtaaccaaaacagcatggtactggtacaaaaacaggcacacaggccagtggaacagaatagagagcccagaaatacttacaacctgcacacttactatctgatctttgacaaagctgacagaaacaagcaatgggaaagaattctctattcaataaatggtactgggataactagctaaccgtatgaaggagactgaagttggatcccttccttacaccatgtaaaaatgtaactcaagagggattaaaaacttaaatgtaaaacccaaagctatctaaaccctgaaagacaacctaggcaataccatactggacataggcatagggaaagatttcatgacaaagatgccaaaagcaattgcaacaaaagcaaaaattgacaaataggatctaattaaacttaagagcttctgcacagcaaaagaaactatcaacagaatgaacagaaaacctacagaatgggagaaaatatgtgcaaactatgcctctgacaaaggtctaatatccaaatccagcatctgtaaggaacttaagcaaatttagaagagaaaagcaaacaactccattaaaaatggacaaatgcggctgggcacgctggctcatgcctgtaatcccagtactttgggaggtcaggagtttgaaatcagcgtggccaacatggcaaaaccccgcctctactaaaaatacaaaaattagctgggcatgctagtgcatgcctgtaatctcagctactccagaggctaagaccggagaatcacttgaaccttggaggcggaggttgcagtgagctgagagcacaccactgcactccagctggggcaacaaagcaagactctgccccgcaccccccaaaaagtgggcaaatgacatgaacagacacttttcaaaagaggacatacatgtggctaacaggcacatgaaagaaagctcaatatcactaatattagagaaatgcaaattaaaaccacagtgagatactatctcacaccagtcagaatgactgttaccgaactgtcaaaaataacagcttcttgcaaggttgtagagaaaaaatgcttatatactattggtgagatcatacattggtttagccattgtagaaagtaatgtagcaattcttcaaagagctaaaaacaactgccatttgacccaataatcccattactggttatatccccagaggaatataaatcattctaccataaagccacatgcatacgaatgctcattgtagtgctgttcaacaatagcagagacatggaatcaatctaaatgcccatccatggtagactggattaaaaaaaatgtggaacatatgcaccatggaatactatgcagccataacaaagaatgagattgtgtcttttatagggacatggatggagctggaagccattatccttagcaaactaatgcaggaacagaaaaccaaatactatatgttcttacttataaataggagcttagtgatgagaactcgtgaagaccaggaggggaacaacaacactggggtctaattgagagtggagtgtgggaggagggagaatcacagaaaaaaatcatggatactaccaggcttcatacctgggtgatgaaataatctttacaacaaactcctgagtttatttatataacagacttcaaatgtaccccaaacctaacataaaagtttttaaaaaaaattaaaaattaaaaaaaaaaaagaaaaaaactgaggctcagagaagttaagtacctcacccaaagccacacagctagctggtatgttttagaactaagctttaacttaagtatctttgactcaaagcctacttttcactgctgttgctgccttgagacagaggtccagaggtgttatgtgcgatggaagcgtcactggatggagacatgacccacccatgggggtatcttgaggaacacactcagttgcctgtgtgaattctaacaggtctgtttgcatctcagatgctctactgtgacctctggtacagtgtggctgtttactagtgatgctattccgggaagagctctagggcttcttagccccatgttaacttctcatggttcaaagtgctgttggcggagcacaatgcaaaatcctgtggatatgggtgaggctgtcatctttggaggaaggactaaagggctgggggcaggaggccagggactgactgggggctgatcaggacgaagagagctgagggcacacagtcaggatgaaattcttctccaatggcgccagggtgcacggtgctgggagccaaggggctctgccttcccaccagccctgccgctccagggctctgtgaacctgggtcacctcacctccatggagccacacttcttatttgcaaaacagagggtggggatccggtgacgaaggagcctccatccagttctaattttccgttttcttatagaagtcgggcttcggtgtgtctggaactgtgtaaggaagacccagtgaagtatcctcatgactgcacctgagctgtactgaataaggggttgtgtgtgtgtatgtgtgtttgtgtgtgtgtatgtgcaccgtgtctgcatgtgtccacatgcatttgttatcttccatccttcatagcccttcttgaagattgagagaagtatcgggatttccaaacttcaatttggagtgggttttgccaggaaattactttggaaactgttgcaaactgcatgcttgtggatggcattctgtggtcatgatcctgccatctgacagtgccagggcctccaagttcgcacagccaaagtgcccctgggggtttgtgggggagactcaggacaagggacacacttcccagcacctcctcagaggttccctgctcagatgtactccctgggattggcctcggggtcacctgcctgagacccagccctgccctctgtcctcagccagcctggaccaggctccttctcccagtgctcaccatgcactggccccaggtctgccccacgtgagggtgagctccacagccagaacctggttttattcgcgtctgcctcctccttgccaaaccaccatgggcacaaagagagcactcactagggattcataggaggagtgaaggatatctgattttttaattgacaaataaaaattgtatgtgtttatcatgtacagcaggttttgaaatttgtacacattgtgggatggctaaatcgagctacttaacatacatattccttcctgtacttattgagttatcacagtgcttgatctgtgtaagcgcctctggactctgactgccatcctctcccctggcccacatccctcggtggcctttcctcccaaacatgcctgccagattctccagaaccctccctgcaggaaaccaaactcccccacatcatcactaaatgttcctccatgtccttgctgaactgaaccctggctgccatccaattacacagcttccctgagcccactcaagtgggggcggctccttctcccacatcctcttcagctcagggtcaggaggagggggcagccttctcgttgctgatgtttcaccctttataaaacaaaatcaaagaaaacaaaacagaaacctgctctctacggcacatgtcatccagctttcttctcttagtcgctgtcctgaatttgtgtcgtttcctgcctcactcacagggatgagggcactccactcaccatcccagcattattccaggagaccccagagatgacttccttaatgacctgaggtcttcgttccctgcctgcctcctttctgaggggctgcttcttcactgtgtggcctcaccgcctccagtgggtgcctctggagcaaacgtgccctggatctgctccatctctgccatcttcttcaagtcagccatttctctctttgaccatgcctgcctacccttccagcactttctcttgtcagtgttcactgcacctgttctcctgcctcatcaggccactccagattattttccctgtgaatggaccagcctgtcacagatcacttaatgcgttctaaagctcacagtacgtcagtgtaacaacagacaacaaagctactagaatggctacagtctccgtttcgtcaagcccacattttatgagttagtgactagaccacattcagattacatttaaatgaagtacaattaaatcaatgggagagcagtaacctcacagtggagaaacctggctgcaatggactaaatgtttttgtctccctgaagtttatatgttgaaatcctaacccctagtaagaggctgttaggaggtgaggcgcttgggaggtcattgggtcatgagggtagggccctcatgaatgggatttgtgtttttataaaagagcccccagagaactcccacgcccttattgccatgtgagaacatagcaagaagacagacatctacaaaccaggaagtaggccctcaccagacactgaatcttctggtactttgaccttggatttgccagcttgcagaattgtgaaagacaaatttctgttggctctaagctacccagtctatggtactttgttacagcagccaaactaaaatgctgctgggtgccttcttaatcagcgatgaaggtcaataccaccactgatgtcatgagcatgtcatgtacccccagaaggatgtgacttcacctgtggggtaggtatttttttcaaaaagcctcatgtccagtctaattataagaaaaacatcagacaaacccaaattgaagaaaattctgtaaaatacctgatcaatactcctcaaagcttccatgaaaaacatggaaagcctgagaaactgtcacaggccacaggagccaggataatgaaatgcaacgtgacatcctggatgggaccttgcgtttatattaacattatgtaactttacaacatttatagtctcaatgtcagaaactttaaatctttataacttacggtagcaaaactctaagatgtttacctgtcagggggatgtctaataatgcacatggaacataaaatatatcagcgacaactgtataggaaagaaacttttcaggtggtcattgggccaccaagagctgtctacttagtttaaggtgattcttaaacttcccccatgtgctgagcttcagagtgggggttttgatgtgtgtggtggagaaggttgtatgaggggtagcagatgggaggcagagcatgtgtgggagggctgtgagcctgcttatgttcctccactgcacaattctgtgtagtaacagattccaggaagcagtcatagatgctctggaaatacagccacctgtagctctgaatctcagtcttacttttgagcaagtcttaccccagccaacgctgagaactcactgaccattcaagacagcgtggcatatatgaatattagcaagtaacatggaattggataacaaaaatataagctcctcacaagacagagagagacgtcccctaagccacacctgactaaatatatcaacaatttattattgatgaatagatggaattaatactagaatcacatggtattgtatttgtttcatagatatttatgatagtttcatagatatttatgataaagctaagtttggtcaaccataaatagttctttcgacaatgctgtgagttctgtcattctcaactaagtttttaaaaatatttctaagttctaaagcatgggctctgaagtccaaatacttgggtttgaatctcagctctgccacttaacaatttgacttgtcttggaccccttaagtaatctgagctacatgttgtcacagggaaacctgagattggtctggcctttctagggctgttgtaaaggttaaatgagatagcacgcctgaagcatttgcctaataatgccaagtacatagtatgtgtgaaacaaatataatctattaccattataattgattatgaattgttaaaggtacatacctatattgtacctttaggttacacgtggaccaaggtaatagttgaattaatcagtctgtgaccagaatgggtaagaccaggtgaggaaatccatctgctcaccccaaaatgccaagccccaccagaggatggtggcttaagcagggttcattcctttccagatatgccccacctgaatttcacacatacctcatttcacctgaccctcatcacaattctttgaaacaagcattttttctcccagtttgcagatggggaaactgagactcagagtttaaaggatttgcccaaagtcatacggcccggaggtgagactcccagagcttgcaccttcttttcccagcttcaagcctaggactcttgccatggtagaccagctgccaaacaggccaccattttaccaccctgggacaaacctgtctttgagctgtgcatcaaagcagaggcatttctcaaaggcgggagtgcctcacccatggaggggacagcaggtgctcactgtgctcacaatggctcctttcatgccagcccctgccttcatgggccaggaggggtctgttttcacccctcaggccccccaccttcattcccctcctcactctttcaaacaagactctgctgcttggcacacaccatggcttaaaaacagggagcaggctcaggttgacaatgccaactgcacagtcaaccttcaaactccagcaggcatccgccctctgtggcagccagattcagagactccggccagatctggcagactggtagacagccatagaactgcaacctagggaggggcaaaccaaaccaagcagaggcctggggttgccatttgcaagataatagctaaagcagcttctgttaacctcacagttttagagcccagtgcctttctcttgtgccatcctcagtatacccagttcagagctaaactggaagcagatgaagttggttgcatttctttctgttccctcttggctaggatccagcaccctctagctccatgctgccccacaccccaccaagctgcatagacttctcagcccaggcactgctgcctgcccaatctttacacttcagtctcagtcttcacactttccccatccctgattggaactccactcagttatgacttccatgaataaacaccagaatccagatagcaaatagctggaaatcctactaatcccatgtccctgcctcttgttctatgcttcctgagctatatgtatgtaccctttgtaagtcaaggatcataattaggtcaaatagggatttagtcattaaacttaagagcatcaaaactgggtgtcttcataaaaagcaagacataaagaactacttttccatcaaataccaagcccacgtttttgtatacatcaaaaatacaagtagattcaagaaagttatataagtaaattcacagtgatagagctgtaataaatatcaaatttaaaatccattgagatggaaaattgaaactaatatttcttttgaagttaacagcgtggaaggctctatgctgtgtcacctcaggaacagaatcttggggtagaaaaagctgctgatttgacctaatatgcatgatttctttttgttttgttttgtttttgagatggagtctcactctgtcgcctaggctggagtgcagtgacatgatctcgggtcactgcaacctctgcctcccaggatcaagtgattctcctgcctcagcctcccaaatagctgggactacaggtgcctgccatcacatctggctatttttgtatttttagtagacatggggtttcaccatgttggcaaggttggtctcgaactcctgacctcaggtgatctgcatgccttggcctcccaaagtgctaggattatagttgttttgtttttaattaaaattgttttttatcttttattttaagttcaggggtacatgtgtatgttcattagataggtaaacttgtatcatgggggtttgttgtacagattatttcatcacccaagcattaagccaagtggccattagttactttgcctgatcctctttgcctctcaccctccactctccaataggccccagggtgttttgttctcctctatgtgtccatgagttctcctgatttagctcccccttataagtgagaacatgtggtatttggttttctgttcctgctagtttgctaaggataatgacctccctacagaagacatgatcttgttcttttttgtggttgcatagtattccatggtatatatgtaccatactttttttatccaatctgtctaggttgattccatgtctttgctattgttaattagtgctgtgctgaacatacacgtgcttgtgtctttataatagaacaatttatattcctttgggtatgtgcccagtaatgaaattgctttgtcaaatgatatttctgtcattaggtctttgaagaatcaccacactgtcttacacagtggttgaactaatttacgctttcactgacagtgtataagcatccctttttctccacaacctgttatttccaccagcatctgttatttttggactattttgacttgcattcttatgcagtgagagccttagtaatagccattctgactggcatgagatggtatctcatggtggttttgacttgcatttctctaatgatcagtggtattgagctctttttcatatgtttgttggccgcatgtatgtcttcttttgaacagtgtctgttcatgtccttttcccactttttaatgaagttttttcttgtaaatgtgtttaagttccttatagatgctggatattagacctttgttggatgcatatttgtgaatattttctcccattccgtaggttgtttgttcactctgttgatagtttatttttctgtgcagaagctgttttggttactgtagccctgtagtatattcttgcgtagtatagtcaggtagcgtatacctccacttttcttctttttgcttaggattgccttggctgtttgggctcttttttgatttcatatgaattttaaaatatttttttctagttccatgaaaaatctcaatggtagttcaataggaatagcattaaatctataaattgctttgagcagtatggccatttttacaatgttgattcttcccatccatgagcatggaatgtttttcatttgtttgtgtcatctctgatttatttgagtagtggtttgtagttctccttgtaaagatctttcacctccctggttagctgtatttctaggtattttgttctctttttgccaattgtgaatgggaattcattcgtaatttggctcttggcttcactgttttggtatgtaaaaatgctagtgatttctgcacattgattttgcatcctgagacattgttgaagttgtttatcaggttaagaagcttttggtctgagattgggtttcctagatataggatcatgtgtctacaaacagcgataatttgccatcctctctccctatgtggatgccctttatttatttatcttgcccgattgccctggccaggacttaactttgtttttatttttcttaattttacattccaggggtgcatgcctaacatgcattatttttgtttgaacacgtacagcatttatcctgccaacaactgttctttgtttgatcatttattctgttattcatgtaatattaccagttcaataattctatcatttgtacataatctaagaccaaatggcactgaccgttgtgacagtgagaaagttgggaaatggcaggattgagggcttgaccccaaaaggtgaccaacactgcaaatctcagaggccaaaggaaggtccccaatgtgagttcactctgggagggcattcctatctgagatgtgggagtgcggtagaggggtctctggcaagtaactcattggatagaggtaaggctaggcagcatggacatttgaggaacatcttctcagctccaagaacatagtttagcttggacggtgtttcacatactgactgcttgcttggagtacagagttcaggagcaggggcagattgtggactaaaacggttccagtgtcagagtagagcagttagacttcatcttgcaggtgacagaaaacccatccaaattggtttgcacggtaaacatgatgggtctgcttgggcaacagaaatgtccgaggaaattagccctgatgcgtggctgaccagggctgcagcatttctctgggattctccttgcctcctctgccgcccccctaccatatgctcacttccctcagggtagggatggccccccaattgaaaggaagagagagaggagatatctctttccagaagtccatgtacttggcgtctctggtgtgttttggtcgtggtttgggttgtgtctactctgagccaatagaactttactgattgattagcttcggccttactttgggactatgtgtttattgtgatgattaaatttatgtgtcaacttgactgggccacagggtgctgatatttggttgaacattattctgtgtgtttctgtcagaatgattttggatgagattaacatttaaatcagtagactgagtgaagtcaactttcctccctaatttgggtgggtctcttccaatcagttaaaggcctcaatagaacggaaggctgaccctcccccaagtaatgaagaattccccctccctgactgtcttcaaactggcacgtctggtttttttctgccttccgactcaaaccaaaatagcagctcttcctggatctcagaactgccggccttcagactggaactatgtcctcagctctcccaggtttccaggctgccaactcgtgctgcagatcttaggacgtgctgacctccacaattgtaggcgtcaggtccttccctttatgtatatgtctacgtctgtgttaatgtctatatctgtgtatatattctgttggttttgtttccctggagaaccatgatgaatgcactcatggttcagggaggactttagtatgaccagaggaactagggatgcgtagaaaactagtgcttaagcccagtcataaactgcttgaatgatgagatatgattcctttgtagaggagacagctgcatctcagtggagtcacctgagccctaggactcatagtagacacattggaatggagggcagcaagaccaaagggtgggaagccagacattgtctgaagtgatccagaagctagttggagcttagcctgctatgctgaacttcaggaaactgtgtttaagtggaataataacatcaccaccaccaccattattggtgcaaggcattagagtgaacctttatctgcattgttgtctttaactctcataacaactctgtgaagtgggtctgattgtaatttacagatgagaaggccaaggcttagaaataaagtacctcaccctgtatcctcaatcgcttctgtctggtggaactagggaaaaccagcacgcagagatgtgacctctggtctgactcagccctctgtagtatggagcttgttcctttggtgtctgaccgtacatacaaacaggcacaccctgcattgaatcacatcagatttaatgttccttgctggcattgttgttgataaacatttttcattgtattctaagtaagggcatttagtgaggaggaggctcttggcattgtcactcactttgctgtttttctggatgcctggaagctctgtttttatgttaagcaaagttttaactttgtaagactttaaggaatttttgagcaagatgattctccccgtgtgcactttaaaacagctgactcgagtgctctaacagctagagctcttaagaatttgtggctggttatggcaaggtattggtggtggtgttggcataaagatgtaacatgtgcttgctgtattaataattcaatccatatgccgtcttctcatttttgtagaagataaaagaagtgcacatgtccaatcaagaatattaaggaagagtgaattggagaaagtacaaaattgaacacacaagtacatgagagaaaagctgttctctctcaaaggctaaatgtgttcttagaatgtaaaatggcttgtaactaaccctagacatacagaacaaacaatgtagaatcaatgctgaaaattaatttttaaaagccctcaagtcattgccaaaactgttgtctctctttaagtaccgtacagcagaagagaaactgtctttaaaatctttctacctggataaactcaatggactttgcagaaagataaatgggaaatcaagcatttgtatgaactgggaatatagatgattaatgttcgcattgagcctgaggcaggtggatcttcacagtatgtgctcgtggcagggctggacatgggccatcctgttctatcagggcttctgatgcacctacttcactttagagatgagcctcctgacacggttgtttagactcactgcctctccagcccctcctgctcacacacagctcagtccccagaatcctggcttccattcccatgatttcattgaatctgccttctggatttcattgaatctgccttctgggccatcaccagtgacctgcttgccaaaccagagatgattttcctcttcaatctcatcacttctgtgcacctacgatgcccttggagcctctcctccctcggcatcgctttttcctggttcctctgagttgcaatggctcctcctcagtgtctactgttggctccttttttttttttttttttacatccccttaagtgtagtctaagttgaatccttggtcatctcatccaaaactaaacctaatgcacagatgactccagcccatatgtgaaaaccaggtaaactcgcaaactctatatgtggggttcctttagcattttaagctgaacctgtccaacattgatcccgtagatcttgtctctatgaatttatagattttcatagggatcaccgatattttgataatgtccagtttttttaatccaaggcaatggtgagttatttgaccattttctggataacgtcatgatcattaggttgaagtgtagaagattgtatgttggtgttggaaggccaagtgggggactgtagtggacatttgtcaaggtttcagctgctctgtactgttcaccttgcaatttaaaaaaaatttctaggtttgtgaatcccactaccccaagatagaactgagaaaactcaccatgccagcctcttcatcaactagggcccaggcaagtggcttatgcgccatcagtcagactcacctgcatgtaattttgttacttgttttctatttgatacaatataaatatctgtctatacctatctgtcatatgttagaaatttgaaggaggaagttccacatggaattcatttttgcctgtgacagtggcagctgaggcatgcagttcttgggagtggcagtctgtcctcacacacaggtgacattggtgccggtggccatagcagctactgccacatttgagtaagtggactttaggccagtccttaaagcttttaggacttagtgaggtcaatggcatggttttctcatcaggcctttactgcagcatgattttgggtctttcctggaagtttggccttgagcctagttctcaagccatctaatatcttttaaataaacttctctcctgctagtttctgttgcttgcaacaagaaccttgactaacacctcagggagatgtgggagggagaaatagtctgaaacaccatgaatattcaggaaggctgtgaactgagcacctctggtgtgccagttacgtagaccaagacataaatggaaattcttggagatgtgcagccttgcacaccacaataaactttgctgctgtacagctgctactccctgtctctaccctgattcttatttcacattgtaatttacacttagcacttcttaaaaatttgtggtaagatgcacatacattttcgatcttaattatttttaagcatacagtttagtaatgttaagtgcattcacatttgtacatccaatcttcaggacatcttgaagatctgaaactgtcttcattaaaccactattgtctatgcccgtttctccccagcccctggcaaccatccttctacttcctgtctctatgaatttgcctactctaggtacctcatataagtggaatcacacagtatttgtccttttgtaacaggtttatttaactcaagattcatccacgtggtagcatgtgctaggatttccttccttttttaaggctgaataatattctgttgtatgaatagaccacattttttttttaccattcatccattgatggacacttgggttgcttccaccttttggctattgtgaatagtatggctatgaacctgggtgtatatgcttagcacatttaattgtactcatgatgactgtcccttatgcagcacttactatgtatcaggcactgctctaacacacattaactccttaaatcttgcaccaatcctgtgagttaggagttattattatctaaattttaccaatgaggagtaaagtgattaaaaaaaaaacccttgtaggaattagggaacttgctcaaataactgaatcctggtggccattgaaagaaaaacttcagacaattggatttagcagagtttaattgagcagaggaagattcttgaattgggcagcacaacctcctgttagccagccagaataggtttggagcaactccatgctgccacgtggtcagagaggatttctagacagaaaaaggaaggagacatacaggaaagggaagtaaggcacagacacagctaggctgggtgcagtttggcatttgccttatttgaacagttggctgcctgtgattggcgaaactctgtgattgatgcaaagtaagttacagtctgtttacacctgcagtttggttatgttttcctctgtatggaaaaacccttaggccaaggttagaatatgtgaggaggcacctttaggccatacttaactgaacatggtagacccaggtcctgtgccccagtcctgctctgctagaggcctttcttgaccacccagttactcttcatcacagcactattttaaatctgtatgtagctactattactctctaacattttagtattaatttagtttttcttcatagttaatctcccactaaaatatcagttctatgaaagcacagacctcatgcttattttacataattatatctccagagcctggatctcggtttggcaaatagtagtcactcagtaaatatttgttggctgaaataatgaataagcctgggcaacagaaagtcttgtaataataaaagtaaaaataaaacaaatgttaataaaggggaaaaatcttttcattaagccaagggtttaaataaactcaagacttaattagaattgctaaaatgtcctatttttttcaaatgaccccatgacattttgataccagctagctgggtttgctgatgagattagtcataatgctggcactgtttctacttcacagaactggaaaagttatgacaacgttgcttatcccgctttttaaaagttaagtatttagttcaaagaaacatgactgttgtctgtaatttcagctggaggtaaaatgagtgacagtttttcaccttgacctccaattctggagtgcaaaaaaagtggacgggaagcactgttctttctgccgctggtcttgcagcagcctgtgggtggaaaggagagctgggcctgaaagcatttgccgccacgctgtctccctttattgatgtctctctcctgggagaagagagatttctatagaagaaataatttctgcagaagaattaggaccaaaaatagtctagaatgggggaaaaaactaaatctagcaaatcatgcggtggaaacaccttctgtttccattgatatcttaagaatgtgctgcccaaactaagctgaccattttgttttcctctcacacggaaacacgtttccccacttgtaaaacagagaaaagaggactttgaaattcattaaggtaataagcaccactgatgtgcattcttgactgagaagttcttagaaattcttgaggaaaacaacagaaacagcagtgtacatgcttttatcatttaagaactgccacaggtgcagttcttaaaagttgattattaactatgcagcctgaactcctgggaaatgagtggtttatctttgtgtgccaggttatagccccgtgcctggcagactctccgtccctgagtgacagactaagggatgatgaaataaatcaatgggaaagcacatctgcaactgggcaaggacgaggggaacagacaatgaaaacagctgtcccaaaggatggccaagtgcctggatttgtttttgatgttttgcttctcaattgttgttttgatattatttgtgccaaaagtgaaacaaagctcctcgttaactgagaagagtgaatatgaacgaagcagcagaccccgggacaggaaaccaggccactgagggtcttgtggctctggtgacccggggtctggggtggtgctgtgggggatgcaaaatgcagaaacgaagacaatggggacacagggaggtgcaaggacagggaaggaaggaaggatccgctcacaagaagagaaaacacctagagacaaaagagagtcactcttatgtaaaaggaagttacccccagaaaagcaggtggaagtcaagcagaaggcagtcccagggggcgtgttccagcaaggtcctcttacatgcagggtggacaggagtcccctagtcctcttggattcacggccagatgggctgacacagtcattgcagcagatcggctcttcaacctcgccttattcctaagacaggctttccagggggatacggcaaagtccttccctttgattcatatgttgttgaggggaccctgggtttcttaacgagccagttttcattattattatttttgttaaaatacgatctctggtggcttagaagaaaataaaagaatgtctgggaagggcaccacacatcacagttgaacttaatagcaaatagctgtttctaccatgcaggccatgccttagggttccattccataagttatctggaacatggaacaaattttcctacgagaaatagccccagtcctggcgacagagcgagactccatgtcaaaaaaaaaaaaaaaaaaaaaaaagagcccagtccacaagagctggtttaattcacagtagaggttaactatagttacaggagccatgttctctgaacccaaaattgggatccatgagttgacaagtacatgtgatcatactggaacgaaagaacagatatagtacacacggacataaagatggaaataatagatgctcaggaatccaaaatgggggaagaagggagtgggtgagggaagaaaaatttcctatcaggtacaatcaccatttggagaatggacactggaagcccagtccccaccagtacacaagataccccgtaacaaacatgcacagggatctgctggatctaaaataaaatttaaaaaaaaaagacaaaacagaatatggaatttggattcatattggaagattcaggtcacagtgtattatagagcggcacacactatgctgtaggccccaggaccgtgtataatccatacttctacaggaaaatgcatgcccatctccaatattaggtgcaggttacattcctcctcttgctgtccaaccccatggcttgaaacctcgggaggtggtcccactgctgttgtgagaactggtctgctctggggcccacaactctttgttcccttggttggtcccacatccttctctcttgcaggccctgtcccaccccaggcttgatctcagccttgatctgaggaccttcaaggcttggcctgcgattgtcagcttcttgctcaccccacactaactttgcaaaccggtcccagcgtccatgagttttcatggagtttcccagtcccaccacttgatgcctgctctcctcctgcacgtgtgtcagagctctgcacagctgcctgcctgccacctgctcgcccccacagcagtgccagcctagctcacctgcaaataccaaagaccttcagccaagagacttggtgctgcccaccctcataccaagcaggatcaagagaggcaaaactttggagccagacacgcctctgtttgagttctgacccaaccatttactagttttcctgtgtttgaaatgggcatgatagtagttttgatatttttggtgtttgccaaataccatggtaagggctttacagatggtagctcattgaagactcacagtaacagtctgaagtatatgctgttactgtctcatttacaaatgagaaaacaggcctggggcacttcactaattaagacatacttttagtgactagtggagccaagtttctgacataatgtgactttaagtatgctcacttaacctctagaaataatgtgagtgagggtcccagcatggtgctgacagcagcaggcctgggcagttgttatttgttgttactctcagtctagatctccatttcccagtaggtgtgtttaggaagcagttgtcgccctagtccataaagtcatactcttaagtgcataactctgctgtcaatagcccatcagtgtacattcaccttcccattccatgccaaggctgttatcccagttgtgtgatggggttcagccctggcttgctcattcatttattcattcatccccccattcagtcaatgactaaatagacatcctgtatcctcatttaccatgctgggtactgtggacccaacagtttgggagatgggcacagcttcttggtaattaccattcagtggaaaaacagacaactgtatcatcacccaatatatgaaattccaactgggaattgttctaaaggaagatgtagggcacagttcaccggatttggcctaaccagaaaattggagagggcttcttggaggaggtggtactgatctgataacggaggatgagtaggaggcagtggcagaagggaagagggggagcagttcgggggagggcagcgggtgcctaggccctgaggcatgtgggaacacgggatgtagatggcccacatggctgcaggagagactttgggtgtgaagtagaactggagatgtaaacaggatccagccatccagggccttgtccgctacggtgcagttttattggtaaaccaagaacactgggaaactgttgaatgaggtgaaacagagctgagggggtgacatgatccacgctactctgaaaagatcaccctggtttcttgctgcagaatggattgcagagaagtcagagatggagcagagcagaggactcccggtctgggcttttccatttgaaagactctggctgaactttccctgctacctggttgcagattgctttcagagtcttgtctagaagtttcagctgatgatcccgacctgagactaggcaggatgggcaaatgctagtaatacaggggggtcctgacggcttgagggagagacttttcctgccaagtatggggtccagttctttcctgggctctactttattttctttctttcttcttttttatctaaaatctcccttggcacagtgctagtgtgcaattatatatcattagttacagcctcctgcctacattaggtctctggactcatcttatagaattgcaattttgtactttctgattacatctccccatttcgcctctcaccttttgggccttacttgactctcccgtgaggatggggatactcatacactgtctacagtaagtcacaaagtcaacccgtgtcccaaccagcatatctgaagatgctgactttcaagttaaggtctaacagcatttcttgcttaggaattgatttgtagttttaaactccagtgcctcaaaatggaaatgaaaccaaaattagaaggaattttatattaaaatattcaacatcacccagctggagaagtgagaaagtgaactgtgaattatgaagaaattacttcttgggtcttttatctaaaacaggcaaatctaaatctcaaagccttttaaccccagtgttcttctttgccataaaaggattcttctccttcacatgaccgtatgtcaaaacagcagcgcctagaatcaaattcctgaaacacaccccagtaaggtttactgctgtaaacaaatggctcaggacatcacagcaagtgggaacattccctgctatggaatgaatgggctgtgaagagaataagcaggaaccaacgacttactagaaatgagaacaaaagctttggcggcttgggcccaagtcaccttgacaccatcacatgcatcatcactcaaaatgaataaaacactcaaaagctacaatcttgccacataaatacagaattggtgggaagggaggatggggatcactgcgcacacacagcaggtgggaagtcaagccagtcaggctggactctgggacccattagtgtggacaggccgcacaccacctaagaaggtaacttccccttaaatttacaggtagatctgagatttcatcggtggccttgatgtcacagagtatcagtgacactgtatgacatattgtacacctcagcctgtaggtaacagtgtagggcacagactcatcttctgtgccctatggcatgtggaacgtccatcgcacatgttaatgttgtgcattactgtatgcctcgtgggctgttctttaatcattttgtttcttggagtcttatcttcctccaaagagttaggcaactctcttgacatttgggaaaccacttccagtgcacctgtcttctgtcccctcacctcctggaaacacacgtacctcctaataagttcccaatgctcccttttgtcattccgagggttctgtcatcctctggtaaggaaaggaggaaaatacctgcatgaatatcaacaagttttgttctattcattcatctaagcatttatttcctgtctattatatgcttggtgctgtggatgtaaagatgagtgaacacatagtgttactgtcaaagacctccattttgtccttgctgttggcctaattgatgcaataatttgactcctttcaggtagatctgtccaagtcatgcatgagagaccaccacttttttggtttttggaggggacaaaaagtgaagagttgagttaatcatacaaagttcaccggtaatctatatgaggcccttctcttattttattttattttattatctttttttcccacttctttatactccccactgtcattcactcttctcctcccagcctaagcacttatgtccttggatatgtatgcatctgtgaaatatagtgttgtagcatgtctgtaagtatcataaactcacatcaatagtatgaggctgtaggtctcattctatttcttactaaaaaaaaaagctggcccagtgtgatgactcatgcatgtaatcgcagcactttgggaggtcaaggcagaaggattgcttgagcgcaggagttcaaggctgtagtgagctatgattgcacaactgcactgcagcctgggtgacagcacaagactctctgtctcttaaaaaataaataaataaaaagtaagcataaatttaaaaaaaattaaaaattgcacactatgttttaaagaccactggatgttgctggcagtcctggagctcattcccctgtcggcttcacagccatttttcaccatttttctcttctgtccccctgggttaaaccccaggttgcctttcactttccacgcccacagacaatgctggaataagttacctgggccctgttccctggtgctggtgctctctgggagtctattcccaggagtgggattgatgagccataggtcatatgcatatctatttatttcactgagtgctgctgtattggtctcgaatggctgcaccatttgcactcatgccagcagacttatacttcattttatcaggatggaacctggaatcatagcaaggatgatgtccgctgccacttactgcaatctactgtgtgccaacctctatgctagttgctagttgcttgacatgcaggatccaaaatacatctttgcaaggatagcaatatctcttcaacaggggaggacgctgaggttcagaaagagtgagctactctctcataagcacgtaagtgttctgtggcaggggcaggcttgacctgatgtcagtcactggtgctgagctcggagtgatttgaaaggcatatattaacaaatgcaccaggttagctttattaaaacagcataactagctgtgatgtctgtggcggggagggtaacactgatggagaattcaccttgagatgattgagttgctctttggagagttttgtccaccacagtgggatacacaggaagctgtggccttttctatactcaactacagccaaaataaaaataagatctttggccgggcgcggtggctcacgcctgtaatcccagcactttgggaggccgaggcgggtggatcatgaggtcaggagatcgagaccatcctggctaacaaggtgaaaccccgtctctactaaaaatacaaaaaattagccgggcgcggtggcgggcgcctgtagtcccagctactcgggaggctgaggcaggagaatggcgtgaacccgggaagcggagcttgcagtgagccgagattgcgccactgcagtccgcagtccggcctgggcgacagagcgagactccgtctcaaaaaaaaaaaaaaaaaaaaaaaaaaaataagatctttgcattattcccacttacatacaataagaaaaacttctaaatcgtctcagtatggaagggctgtcttctttactttgtaattttataagagtagtattttttgtgtaattttgccaagtgcttctgactataaatctaaatgtttaatggttggaatagcccaagccttctatgctggactagaaatgatagcctacagttgagggtgaaaattcatttgcttaataaaaacttttctggatgcaaaggtggacaggcattcattccagccttgaggtgctcaccagctgatcagaacagcatcaaccagtaacttgggagccgagtaagttctctatcagccagtggagaccccctagggcaatagaatagaaaggcacctttttgcaaatgcagtcctcttgcaggccgtgagtgacaccagctcttgccacctgacaaagggcacagacaccaaaccctgccccgcccacaggagtccatttcaactctaccccatgggcaggtaaggaaactgggctctgcaagtcacaaacaagtcagcagagtcaaggagggcaggcctgaccttggccacaggtgctgcagatcagaccacattaaccaggaacttgagttgaagtccaggcggagcttgcggggagaatggctagctctctgtggagttgaaggtggttggaggtttgttgggtttccctaagtttccaagcctgttctcctccatcatttgctcagagaataatattacaggtgttgggagagctggttttgtaacattaatcagagtggattaaaaggttactttcttctgatttgccctgagaggattgcttggcaaatcaaggggagtcacttttcagacagaaagactgcacttgctggtttgaaacacactgcgctcagccacatggagataagagcaattccctttgctactttagaatgataaagctctaactgctcatttcccggctgctccttcccttgtcactgggggaaaaaacccccgtctggagatgcaggtgctcttctgacattttccttacagcagggcaggaatccaatgaagcatctcatgaatttctgcaatatgcatggattttaggtgtgccgtttgcaagagtcaccacaccatgcccagcatttctgttgcctattctgaaagtggaaggttttctggattatagtttaacaagcgtttttactccttcttctcagaaagagaaagggggagaaagagagagccgtgactagaattgtaatgagctcccaagcctgatcctaattatcttccgtaacttagcaacaagcgagacgagagaagaaagcagctgaacaatttaaatgcgttggggagatgtgggtggaaagaggggaaaagggccccaggtgcagtcgaaggaggcattcgctggtggggaaaagggtctctgtgcttgcagttctgcttcttttgagaaaggaaggaggagctgagcccgcgcatgatggagatgctacttatgatgctcccttaagatgggcaggatgcccggggaagaaatctgggttcttcatggtgtgttctggacgtgcgaggtacacaggacactttttgcaccctgactcacttcagccctcttagcaccacctgggtttcctttcaaaatgtcagggaaacctggctttctggtttttcttaaaaaaaagcaacactacacagttcttcagctggagatgaatttgtgctgactgctcagttctgtcctgagggtctctggtggaggaccacagagctcacttaccaggtgttcagggggcacaccatggccatttgagtagttagcagggcctgtcttcagtggtttggaatgctgactttaaatcaatgaagtggcgcagtgcagtggctcacatctgtaatcccaacactgtgagaagccaagaggcagcaggatcgcttgagcccagaagttcgagaccagcctgggcaacatagcaagacccggtctctacaaaaatatatataactatgtatatatatttataaatttgagtatagattagaggaaacctgccttgacagcaatttataagaaacatatctgaggactgatgttgaattaccaactaatcataagatgctaggggcaataaacccccctaagtcagccgcctgtgtgttcgcagtcgcctgggattctgggttggggaggcggtgccttcgtggcgatgttgatctggagtgtgtagtgtggcatgtagggccctgttctgtgctttttcccttgttttgttgagacagattcttgctctgtcacctaggctggagtgcagcggtgcaatctgggctcactgcaacctctgcctcccgggatcaagtgattctcctgcctcagcctcccaagtagctgggactacaggcaggtgcctgccaccacacctgacaaatttttgtatttttagtagagacagggtttcgccatgttagcctggctagtctctgattccttacttcaggtgatccgcccacctcagcctccaaaagtgctgggattacaggtgtgagccaccgcgtccagcttctgcctgctttttaataagcaacattggccaacttagaaacgtccagaggggcagtgccgtctggaagccctgccctgtggggacagctgcaggaactggggtgcagaaatcagctcaaaggaggacgtccgagggaccctagatccagaggaaggtgctccttctgccaccacgtgccttctctgcatgttgactttgcctttacctgactttactcacttccatgtggcccgactccctttccagggagggtttacctcccgtgctgggcagtgaagagggaactgcttgctgggtgctggcatggcccactcagccagcctctgtgggaatgccagcctcttgcttctgccaggcgagacccagagtttcatttagggtccagtgtatttcctggctctttggtgttacctagccccagggtgctattaatagtgcaaagcaccggaaccagggcgcagccacagagtaaacaaacactacaggttctttagaaggcagagaagccagagagggtttccagggagagagggagttaaatggagaatcagactgaagcaagtggagagaggatgaaggaaactctgggttagaggacatctgttgccaaggtgagtagcagagaagtttcactgtgggagtagcaggagaaagctggagaaacggtcaaatggcagatagccataaatgccacccggtgagtttgactttccttatgaaggcaagacatagcaccatcagatttggcaaataaaaatataacaggcccggctacgtttgaatttcagataaacaacaaatatcttttagtgtaagtgtatcattcatattgcatggtacatagtcttgctaaaaaaagggatctgaaatttagctttcactgggtgtcctgtgctttatctggcagcccaggcaaggggaagtcactgaagttttgtgatcgcagggtcctcttaggaggacccatctgcttgggtgacagctgcggtcgaagaagacaccagggagagggctgctcatagggaaacgtgggcagtcatcctggcatgaccacaaggacctgaattatgggaaaaatatgaaagaaaggatgaattcaaaagacaagttcgatggctgggtctgtagccttggggactggcgagaaggtggaatagaggaggcagaggcagcaaggatgagttcaagggcaggacccatagctgggaatgccacagaagacacagttcagaggaagagtggctgcacaaggaaagaaggcagactcccgagttctcttgaaaaccttttcatagtagacactgagtgggaagggccagccagcagaagcgggtgcagagcggaattccaggagggagaggggtgggagctgttgacatggccctgggtagtggcagcagctgaagccagcaatgaagcagatgcctccctccagggtcagagtggagcagcgaggtcagaggagcagcccaggagggaaccaggagaaggctgctgcttggcaaacagacccggtctctaatctgggctaagaagtgaatctggtttccctgtggcccaaagtattaggaacgttttctttttttaataaagcagaacagcaattgtggagaaacagtggcagttgctctcatggggtccctcccccagtcacagtgggcttggacctcacttgtgcccagcaaggctttctctccagcctcatactcccatcccaaaagatcacagggaaacctggcaatgtcaccactcccagagcctgccagcccagggtctggagtgaagagaggggcaggggtgaggccccaagacaaggggcctgggacctccccagtcttgcctgagttcctgagcaaagcctgctacccaccccctgcacactctgcaaagcatttctgtcacagcaaactgttgatcagccccttgccctccctcccccaggggcaggattagacacaagagaagaatcaaacacttatgtttccttttagtcgaagacaccgggagaaagtagattgtgacccttagctatggacagcatccagagacttaaaaatagctgaattttactgcaacgttaatagaacctaaaggtttcaggcacctatgcaggtgaaaatctttggatttccagctgcatatcgatgaatgattccagtttaaagtcagtgaacagtggggcgaactcaggcattacaggaatgaagatggaattgctgaaatacccctgccatggcatctttcatcccctctctacacacacgcttctctaggtcacagaagctatggggaggcctctggcaccctgggaagctctttgatctacaacttggcaagtgttccaggaagcccgtgttctgggtggccacggggctcctgctcctccccagagctgctggacacagcctaggtggagctgcctgataaggacccaagagggctggtgaccagacactcctggtcccaccggtagtcttgcccattgctcactggctgcagcccctgaggtcagccagcccagctcttccagctttgggccttcctccagcatctcctccagctgcctttgtccagctgtatttagtaacaattttataatgtctcaacagctgctttttaccctctaatttgtgaatcagccaaatgcctagctgagatgaaagtcctggggtcacacacttctggacttgtggtcctcactcattaaacgatggtggactgtcatatgaaaacttgggctgaggtgtgtcctggcagacagggaactggcgtgttaatgctccctaggcagcactggatgcccacagtgtttgaggtagggattgtttgcattctacagatgagcacaccgaggctcagagcggtaaggaattggcccgcagtcacatgactattaaagcatctgaattgggattagaacataaacccagctgacttcaagttctgaaccctgcactccatgctccagtgtggagccgcagtttcctttcttcctcttgagatgaagacacatgagaacccaagcccatcaccctggacattgacacttctcttagggaaacactgggcaccatgtgttgatcgttgggtccacagcccaaagactggcagaatctcaatactgtcccagcaggtggcaactgcactcatttttaaaatgacataataaacacatctctttaacctcaattttctctttcccaaaatggaataaaaaaatcaaagctcagaatcactgccttccagaaggtgtatagtagaaactcagtggcactcgggccctgcttctcactgagagctgcgtttccagggccaggtgctgagccagttctgagagccaatctgccatcatttaatcaattaacaccaaaggccagaaatgtgtgaccccagcttccgtcagtgctggctgaggagtgtccccaaggctggctccaggaaagcgcaagcaagggctcctgggtccactggttcctgtgcagcaggcaaaagaggtggaagggaatgatctgggtctggagacagggatgcggtcatcgacagctctgggtttatgacaaaagaaacctgcacaaatgctgatgaggatgggacacgttcacaggtggctttgaaaagtatctcaagacaactcaattggcagttttcatagatgaggacaccagtgtgtcaggggacacaaccttttaactaaaaacagttccacagggaataacggaagcacacgtaggaagagtttctagtgccttcctggtgtcttgcatttcccctgtgtctcacatgatttttgaatgcccatgccggccagcctctgcttcatggtttgctgttcgtatggtcataacccatgagcagtgctatgaccatatttgcatgggacccccccacacaccactcggaccacattctcacaacagctcggttgtggcaaaaacaaaaaggagataaagatatttccgttttcactgctgtggacgctaaggaccagaggggcacaagattggtctattattgtcttttagtaggcagaagagtctagactgaaagacagttctcccggttctgtatctgatggagtctctatacaatatgcaatattacaaaacccctctgggctagggcaatcagttagtgttgtggtagaatttgcatagtataaatgtaccttttaatgaaataaccacaaatcaccaaaacgccaaataatttttaatatcagtgcagtccatgcgatatttgaatatagttgtcctacaggaagtatttgtcatttatctgaaattcaaatttcactgggtgctttacccatttctgctgccataacaaaatccacagactgagggggtaacttataaacaacagaaatgtgtttcttgtggttctcgagattggaagtccaagatcagagcaccagcaggtttggtgtttggtgagggcccagtctccacttccaagatgatgtcctgccgctctgtcctctggaggggccaaacgctgtgttttcacatggcatggacttgtcccctcaaacccttttataaggtctctcatcctgtttatgagggctctgccttcaggacctaatcacctcctaaaggccccacccctgaataccatatcaagttggtgattaagtttcaacacaagaattttgggaaagcttcagactatagcactggacttcctttatttttttttcttctaaatctggcaagtgtaattcttctgacattggtcagatttccccccagttctctgcacttggacatcccccttatggactttcctctgctttgcatgataaactcacatgtgttgacttctctgctctgctgtggccagggtcttactcatgctgcttgctgtgaacagggtttggtgttaatggagcttcccctttcatagctccagcccatccctgtccatccaacctgtacatttaaccacttacttggcatctccttctagatgccccgcaaacacctcaaacacaaccatctaaggttaactatcttccccacaaacatgagctcctcctgaccgtcccctcaccgaacggtgtcctcacctgagctttgacctcgccctcttttttcccatgctcccccatccaatccaccacgtcctacagactactgagcatggttctttccattctgtttctcccatcccactgtccctaccccacttagagttaccacagcttcttgactggactgccccaacttactgatgttccctatttgataagacatcatcctttcactttcttctaattctttagacatgacctcctccagtgatttgaacatatttataatagctgacttaaaaacttaaatccaacatctgggccccttggacagtttctattgactgctttatttcctgtgtgcatggaactaaactttcctgtttcttttcatgtctcacatcttctgttgaaaactggatgtttcaaatattaaatatccagattccctcctctctcggatttttgttgctgatgatgctgtttgcctgtttagtgacttctggtctgattctataaagtctgccttttttgtcatttgtagctcccgaagtctctgcttagttagcctagtggttgcctaatgatgggagagagacttccttacatgcattgaactggtcagtttttcagcctttgctgaggggctctgtgtgtgtgttggggcagaccttcagtactctagcacacagttcacatctctgccttaccctgacctctctgctaggaatgggccttaaggtcagcaagaggcgagagactaaatccttctaagatcttgcttgggcatacacacagccgtgcacatgggtgtggccttcctggttctcaataatatgtcatagctttacaaaccccttatggacatctcattccctagtatttccttttaagctttttggtcagcctcttgttagccccatctggtatcaccacttcaaaacgctgctgtgttaaacaattgccattaatagtgtttgacaaatgcctttgagatacggctgttagaacagaatattctctgagtaaggtcaaatgaagacaagctctaagaattgagcttttcaggctggatgcaatggctcatgcctgtaatcctaaccctttgggaggccaaggcaggtggatcacttaatggtcaggagtctgagaccagtttggccaacatggtgaaacctcgtttctactaaaaatacacaaagtagctaagcgtggtggtgtgcacctgtaatcccaggtactaaggaggctgaggcaggagaatcgcttgaacctgggaggcggaggctgcagtgagtggagatcatgcccttgggtgacagagggagactccatctcaaaaaaagaattgagtattttggggaacagccaggcaagttaaataagggcagttttctggggatggctttaggggagctctaggcttattctgcccctctcatggctgctaggctgctgttctcaggctttcacaggtctaaggctaccatggagctggagagaggggagatgggagcagggcaggttgaaatgccacaaaatcaccgttcttcctgacggttagtcatagtctttgactaaacactttactccttggattgttacaagcctttggtgaatttgcagtattttgaaaaacttgttttggccatttttgccagttttctcattgcttttatggaagaacaggtttagggaggtacttattcttctattctggcaataacttctccaatgttgatcttttaaaagtgcttttgagattgtgttttaacccaagttaggaaacaatgatcatgtgatgttttctggacattccggcagctctctaaggaagacaattttaggaagggtgtgatcagataaaacactagatatttattttacttatttctcataccccatagtaggcctttattactgccttgctcttgcatagttagtgaatgactgcaattggtataactggaataaaaagagataatggtttatattttagaagcagaagagttaataggagccaggagttttaagataatggtgataatgaagtcacatggaaaccaattaagagtaagagtttataagaaaaacagttgaaacctaagagtactcaaaggcaatcagaaagcccattttagggtctcttagagatggactatgtagaaactctatacaagagaatattttctgctgccctttgcctctaaaaacatattgtactattgatgtactgtttattccctttcaaactgccacatttggcagcttgctatttctacatgttttaaagttgtagcttataaaaaaagtagatttcttagcagtcatatttgggcatctgtatgtggagcttttatactccatagactccactgtgtggacttactgaaaaggctggtaacaactagaagattgcccgagtaagcctgaaacactgacattaagttgaatgttttggtgtttggcatcttctcattaacgttgcagatgactattttcttacacagagaatctgagaggatcaccaaaggccgtgatgattaatcttattttccagagcatcctggtaaaacaatgggcacgatcacattttgttagtaaggtcacattttacttgaattgttttccaaagccaataaacaatccatccattttccacctgaccctaataaacaggccctatatttcataaggttaaaaggtcaggctgcctgagagacatcagtgggaatctgctgtgtctctttgtgcctggtttcaagcacgttttataaagggtgaaaacaaatgtctttgagttcactcaagctgttcatccttcctgaatagaatacaagtcaggaaatgctgaaattccttttccaggcaccagtatcccactgttctgtgccattaagcttgcaaacactctatcaccatttgccatttttaaaagaggacgtatggttagtgatctaggttttccgaaggtaaaatgacttcctgaaaattgagatgggccttaggtagaaatggcctattaaatggtcccaatacagatgcaaagttcaggcacgtttctgatacaccccaaaaacagctggaaagatcaggcccaaaatgctccattgaaatctgattggtttgtttcttctgtgctaaatggaccaattgtggggagaggcaaagtcacataaaggaaatagaagcttggcttggtggctgtgaggaaactgctagataggtttattttaaatattttctatttattttaatgttacaattttatgaaaagcttggttgctttaagaaccaaaaggcaggaagggtacaggggaaaagatctaggctgtggtcataatacttagaggactgtgtgtcaaagcctgggtcatggaactgtaagaatcatcttggatgcttgttgaaaatgtgccttctgggtggggggacctgatgcagcctcaactgtaatcagactatatacctcaggcctctccccgtcccggaggttagatgtcattgtgcagtaatgatgctgtaggccatgcctggaagaatggatgtaaacagtagatgtcagcatgaatgagtctctggtgcctgccttctataccggaatgtcctgaacagctctggagcagacctgggctataagatttgggagaagagcatgaacaggtttgtggggggcacattttgggtgtaaagccattatttcaacatgtcccaaagtactatttgatgcagcttggcagcacaaaaatgcctgtgcacccgtagggagtgtgatcctgaggactttggcgagaacatcgtggcctcacaaatgggaactcagggttaacatagaaaaaccaggttttgactgcagctttccacgggtacatttagtgattctgaataaggatttctgcttgctcagggttgtgaaaaacggatcaacattgtaggggaggattagataactcgaaaactgtcccatcgcaagatatctcagaatgccagcacacagcagggcaaggaaggcagaatggcatctgccaaatactgtgacgggacaaagctaggaggtgggtgcacagatatttgctctatagaccttattctttctttatgcttaaaatgtttttaaaaatgttttaaaatttaaaagcctaattgaagttagctgtgtgtggtggtgcacacctgtagtttcagctgttggggaggctgaggcaggaagattgcctgagcccaggagtttgaggttacagtaaactatgatcataccctgcaaatagccactgcactccagcctgggcaatatagcaagaccctgtgtctaaaaattaatatgtaaaatatttcagaataaataaataaaatctacattggtgacagccttttcaagctcattaagtaaaaacctccttaccaccttatacccattaggatggctactaaaagaaaagaaaatactaagtgttggtgaggatgtgggaaattggaacccttgtgtgctattggtgggaatttgtaaaatgatgtagccactatgtaaaacatggagatttctcagaaagttaaaaatagaatcgccatgtgatccagcaatcccacttctgggtatctatgtaaaagaatgaaaagcagagtctcaaagaggcatgtgcacacccatgttcacagcagtgttattcccaacagccaagaggcggaaacaacccaagtgtccatcagtggataaatggataaacaaaatgtggtacacataggcaatgaaatattatttattgcataatttcacaaaaagaagaaaagcctgttacatgctataacacagatgaatgtcaaggacattacactaagtgaaataagccagtcacaaaaggacaagtacggtatgattccacttatatgaagtacttagagtagtcaaaatcatagagataggaaatagaagggtggttacccagggctggggtagggggtgcagaataggggagttaaatttaacgggtacagagttttagttagggaaggtgaaaaggtactagaagtggatagaagtgctggttacatgaaagtgggaatgcacctgatgccacggagctatacgtttagaaatggttatgatggtaaatatgtatattttgccacagttaaaaataaatatttttaaaaagaaaaaccaccttagataacagtaaaatgagactgggtattgaatgaatctacagacttctcttctatgtggatgcaaaactcaaaacagtggacttgcaatctaccctcgtttccctacaaatttggttccctgggttaactttcccaaccatcctgtcccaaacaagtgttgcaatcccagcgaagtgctttggattggttcagctgtaaaaaccgtcatttctatctatgaaatgggtcttgtttctggtgccataccaataacagtgcatctctcagacttcctttatcacacccaggttccttcagacgagaacctagatgttggggctaaatccagagccctttattccagaagaaatacagcaaggtacctacacctgcctctgagaggctgcctgggtcacttcccagctaagcctggtggcgtcctttatctcccagagccctcactatctgctgcctccgtgcatcaggccatgccttgttgtgatgcttttttcagtgacttttcattgggatcctaccacctgcctggtgcctgacttgttctggagctaaaccaaagaacaaaacagacatagcccatgttcacgtggagcttatagtctcgggaggatatcaacattaaataaatatataaagttatggttagtgctgtaaagaaaaaagagtgttataatagaaaataacaaggaggcctgggtgccgtggctcacgcctgtaatcctagcactttgagaggcagatgcaggtggatcacctgaggtcaggggttcgagaccagcctggccaacatggcaaaaccctgtctctattaaaaatacaaaaaaaaatagctgggcgtggtggcaggcacctgtaatccaagctactcgggaggctgaggcaggagaatcacttgaacccagaaggcagaggttgcagtgagccaagatcgcaccacagcctgggcagcagagtgagactctgtctaaaaaaaataataataacaagggggacctaatttggacaggtatggagaagccatagaaagccactaggatgaagtgagaaattcaactgagaaattagacatgagggggagtcacctaagaacagaggggggactggaaaagagcatcccaagcagaggctgccccagggcagagccctgcagaagagagctcagtgggcccagcctgggtaggaagtggaggtgcagagccggaagaatcatgcaggccagatcatttcaggctgtggaggccacacagaggactgtgacctcttgcccaggtgtaaggagatgctgctgaggatttgaagcaagagcatgacatagctagattttccttttaaaagatcactcaggccccttatgtagaatggattaaaaggggacaaaagaggagacaaggagcctagttagaggtgaatgcagaaattcgaggagaaacagcgttggccccggctgaaacggtgccagtggagttgaagtgaaatggagatagaattaatagggcttcctggagggattaaatgcagagagggagctgtcagtgcacccggcatgggtggctgggtgggtgtgtgaggtatttaatagttctcatgcactgacagttcactatatgccaggctttgtgctaaacatgttgcatcatccatttagtcctctcagtcagcctgtgggctgggtgcttacaaatgagaagctaaataatttccccaaggtcatgcaactagtaggtgactcaggaaattcgcagcctggtctactcactccaggacccaaagttcaggggaagaccagaaaacaaaattggcagaaaagagctaaacctcagttttgagtgtgtgggtgatgaccactttttcctagctcaaaggcaaaaatactagattctggggagactgcagcaaccacacagcctagtttctaagtcctttgaatcctaacatgaaaactgataaagcaactagaacaactcatggacgacacttacagcaaaactaggtgcaagatagccaatgatttcaaacaagaggagccaaactaccaacaaaaacaagccaggcatagtttcagtgtctgtgcaagagaaaagagagggaaccaaccgggtacctggatcatgtaaggagagggaccccccaacatagccaaaggtatgcaccggaaagcatggtacaatttgagaacagcagctggagatgaaactgtacaatccaaacgcaggcgagggccccacactcaggagaaaccgcggagaacagaatcaaattaaacatgaaagggacagacaaccatgggagatgacagagtcaggaagtttcagaataagccactgtggttttgaatactacatgaaaacagaaggacctccatgaggttcagactgccttgactctgcatcctcctcacagtgcaggaaagctaattatttcacatgaaaatggccctagaaggctattaaagaccaggccccagagaaaaacaaatgaaagttacattcactaaaaagggagtttttatctcaaagcaatctttaaaaaattaagagactgataaaagacatgaaagaataaaactcaaaatggaaaaatacagaagtgaagtagcaaaacacagaaaataaacagaaataaaataaaaagtaatttcagaaatgaagaacagaccaggcacagtggctgatacctgtaatcccaacactttgggaggctgaggcaggagaatctcttgaacccaggaattcaaagtcagcccgggcaagaccccttctattaaaaaaataattaagacttaaacgtggcaaaaccctgtctccacaaaaaatacagaagaaagttagccaggtgtggtggtgcaagcctgtagtcccagctacttgggaggctaaagtgggaggatcacctgagcctggacgtttgaggccgcactgagctgtgatcacaccactgcagtcctgcctaggagatagagtgagactgtcttaaaaaaaaaaaaaagaagaagaagaaaagaaagaaagaaagaaaaaagaaagggccggatgtggtggtttatgactgtaatcccagcactttggaaggctgaggcaggtggatcacgaggtcaagagatcgagaccatcctggtcaacatggtgaaaccccgtctttactaaaaacacaaaaattagctgggcattttggtgcgtgcatgtagtcctagctacttgggaggctgaggcaggagaattgcttgagcccaggaggtggaggttgcagtgagctgcgatcgcaccactgcactccagcctggcaacagagcgagactccatctcaaaaaaaaaaaaaaaaagaaaaaagaattagccaagcgtaatgtcatgtgcctataatcccagcttctcaggagggttgagctgaggagtttgaggctgcagtgagctatgatcataccgcttcactcctgcctaggtgacagagtgagatcctgtctctaagaaatttaaaaataaaaagaatctttaaaaactaaatggtcatcctcagagggtgatgggggaaccaatccattctcttgaaaatctgtgaatagtggagaaaagcatgcatttatcctgctttatctctacaggtgataccaactggtacaacaaatgaggatgagcatctctttataatatcattctatctaataaatggacaaaaaagatggaattaaaagatcaccattttgcaaatcccaatgaaattaaagtatcctgtcctgtccaacaagttagtcactggccacctaaagtttaagtaaaatcaaataaaaatgttagttcctcagtctcagtggccacattccaagtcgtcagtggccacgcacactagtggccgccctgtggggcagtgcagacatggggcattttcttgaccatggaaagttctgtcagagggtgtgcttcagaccccatgcatccacaagcactggcctcacagcgtgggaaacagacaggtgtcccggggagggcccacagccccccgggtggtgtttccagagacctaccaagaggcggaccaggcccctggatgtagctgtcaccttacaggaagcacagaggatgagcgccatgtgatcagtgtcatgaatatgcagttcaaaaactccagattcagggaatgtgcagatcacatggtctgggtttttttaaacagataaaccataagaaaaagaaagggataaggaggatgcagcttcacaggggcttagaaattttaaactgtcaagactaaactgtcatgtctgtgaatgaacacttggatgaaaagctacgaagaaatgcaaagacgccatttctctaaaagcagggcaatgatttttagtggaggaagaaccgtgactggcccagggtccacggaggggcttctggtgtggccggcacagttctctttgctgaccagagtgctggtgacaacagtattcaccttataataactcattaagctatattattcttttccgtggctttctctatcaatgatttattttataatttttaaatagtttaaaaaaaaaaaagaatcaaaccaaggagtacatcactggggcaagcccctgacaagttaatttctatgatttatggtctttcaatgtgtttactgaacctttttaccaagtggcacctatattgccgcactgcattgaagacgctcatactctgctggctcagaggtactgcctggctctctagaggaggaggaaatactttccactttctcctgctgtcagcttatgcatttagtttgcagatgagtttacttcttaacagctgtaataaatgtgtttattgagacttgtccttctccctctctccctgtctctcactctcgctctcactccctgtctccctctctcagctatttccagtagcacatgtggcctttttccttcatcttgtagtgatggaatgttctgacacatgaagatgattgatttgatttgagtctctcccctttaatattcccttatgagagctgaagcccatagaaggaggaagctattttccaaaggtcacaaaactaatttgagcaaagttggggctagaattttgatcttctactcaccagttctgtttctcttcaaaagcctgtatggagacactagcagattttgctcttacctgagctcctcactcccgtgctgcctgtaactttccccactgttgcaagatgcatttcactgcacatcttcatccaagcttcccaccctccttctggtgaactcttgccttgagtaagtattttgaaaataattgcaataatgcattcatgcgttctcttgatataaatcttcactgggttttagggcattgaaaagggaaagaaaaacttctatttcatgtgactgacagtagcacagcattattcctgggaattatgaccatcctgagagtgcatgataaataggcaacagcaacctggtggacactctcaaggggaaattcgcatacacttgagtgtgcaggggaagctgtgctgtaggttaagtgacttttggtgcctccactcctcctgatggccctggcccctgttgctcctctactgttctcatctatttacttcttatcctctcttctctttctcgccacacactcaaacacatataattttcaaaacttttcttaaagtccgtataccatttcatcatacagatgcaccatgaacattcgctatgttggataaacagtttatcctcagttcaacagcattatgaccactgttgtacttgattttttttcatggtttaatgctagcccatggtttgcttatttgtcatccagcttggatacttttttcttgtaacccatttaatactgctgtgtattcaatttaactattttttaaattgtggtgaaaaaaaacaacacataaaacttaccaccttaaccatttttaagtgtacagtatagtagtgttaaccctatgcacattctcatgcagaagatccccagagtgttttatgttggaaaacttgtaactctatattcactgaacaactcatttcccccttttctcagctcctggtaacattacagtttctgtctctactaatccgtagaagtggaatcacgcacctatataagtggaattgttcagtatttatctcttgccactgacatatttcatgtagcttaatgtcctcaaatgtcatctgtgctgtggtatatgacaaaattgtcttctttcttagggcagaatcatattctgttgtgtgtgtttaccacatgttctttgcccattggtccattgatggacacttgggttgcttccgtcttttggctattgtttataatgctgcaacacacatgggtgggcgaatatctgctcaagaccttgcttttagttcttttggatatatacccagaagtaggattgttggatcatatggtgattttatttttaatgttttgagaaatttctatattttttccatagcagctgcaccattttacattcccactaacagcgcgtagggttccaatttcttcacatccttagcagcagttgttattttctgtttttcttgatcgtagccactctaacaggtgtgagtgtatttcattgtggttttgatttgcgttttgctaatttataatgacgttgaacatctttccatgtgcctattgtctacttgcgtatcttctttagagaaatgcctatccaagtcctttatccatttttaaattgggttatttgtttttgttgttgttgagttgtgggagttctttatatattctggatattaactcttcatcaaatacatggtttgcaaatattttctcctactctataaatgtcctctttagattgttggttttttcatttgcttcacagaatttctttttttttttttttttgagatggagtctcactctatcatccaagctggagtgcagtggcgcaatcttggcacactgcaacctccttctcccgggattaggtgattctccttcctcagcctcctgagtagctgggattataggtgcccaccactaagcctggctatttttgtatttttagtagagatggggtttcaccacgtgggccaggctggtctcaaactcctgacctcaggtgatccacccacctcagcctcccaaactactgggattacaggcatgagccaccacgcccagccacttcacagaaattttttaagttccacataattccattagtttatttttgcttttgttgccgatggttttggtgttatacccaagaaatctttgccaaaaccaacatcgtggagacttttccctatgttttccttctaggaattttagtttcaggtctttaacccattttgagctgattatatggtgtaaaatcaggactcaactttattcctttgcatgtggctatcccgttttcccagcaccttttgttgaagagatgagttaaacaattttttacgaggtaaaatgaaaaataataaatcagatatgttaagtcattcttgggtttcattgtcaggcataatgagggcagaagaatctcatgaacttcactttaaaaatagttctgaatacgtcaaaatgggaaatgaacaaatacagagtagttattgacctccctacatattccacagatgctaaaccaggttattaccagtttattttctttacctatgtctagtctttacacacttataatttgaaaatgcaaatagtgttgctgtttgtcctatcatgtacagtataggctgggtgcggtggcttgcaccttaatctcagcacttgaagagactgaggtgggaggatggcttggaaccaagagtttgaggttacactgagctgtgattacaccactgtactccagcctgggcaacagagcaagaccctgtctcaaaaaaaaaaaaaaaaaacaagaaagaaaagagcaggggaggagagagagagagagagaagagagagagagagaagaaaatacatatggtaaaaaatgcctgccagagcaccaaaatgttacttaaacatatagcttgtataactgtctatatataattacacacatataggtgcactagatgtatctatatgtatttctatatattgtaactacaaaattggcagaaggtgctattttccagtggcagggaaagaagggaggaaggataagagggtagtgagataaggtttccctgtagagaagcccacactcaagcatctacatccctttccagagaattttcatccctttcagagttacagggtggtgtccagagctgccgtgccactattcctgagggggaaaatcttaaagggagtgtcctcacaccagcgctgctcagacatgtcactttctctgtgattagctgattaggagtgactctaagtagggccgattccagcactttcaatgcttacttactcttttcctgcagcctttctcattgatggggacataggaacgttgtgattttaatgattttataaatgaaattacttatataaaactgttagagagctgtagatgacacgtttgagaatgtccgtgtcagtctgctcaccacatgtgtacgtgctgagaaaatcccagtaaggaaaggtcacggtggggtgaaccgtttggatttgttgaacaatgtaaagctagaatgggttttttttttttgttttttgggtttttttggaaagaatgtttggtgttttgacaaaaaggattttacttcatcttaatttaaagggatcctggttccatcagtctataaaatgaaaaagcaatttagcccactcaatttttagagaggtttggttttacaattctcaaggcaggcataaatccgctaatccttaaaacactttcccttaaccatttattcaaatatgcagttaagggaaagtattttgtatatacccacatatgcaggtatcttcatcttcgtggatagatacaaggcatcccttagagacaagagctcctcggaaagaagccgattccttttcatttactccttcactcatagtgacaatgagaggggcatgtggaatgcaaataaagtattaggggaagttcccatctttgatgagctaagagtctaattaataaggcacaattaactgaggatctatctaaataatctaaaaacagtgctttgcacatagtaagtgccatagattttgatataataacttgttagttaatgttttaaactctggataaagtcctaattttcttagcctggctgcagcctcctctccagttttattcatgctcactcccccagctcctcgccagaggccatgccaaaccctttcacacacctgtgctttgtgattttttgttcctcttttctagaatggtgtcatctccattttctctgcctgacagtctcatgtccatccttttaggagctacttgtcatcttctcttctcagacctgcctgcttccagggagaagaagtcacttggtcttctgaactccacacattttattcttacctccactatggtacctcttggcttcttacaatcgttttgttttgttttgttttgtttctgtgagacagagtttcactctgttgcccaggctggagtgcagtggcatgatcatggctcactgcaacctccatctctcaggctcgatggattttcccacctcagcctccagagtagctgggactacaggtgcacaccatcatgccaggctaatttttatttttattttttgtattttggggggtagagacggggatctgccgtgttgtccaggctggtctcaaactcctgggctcaagtgatccgcctgcctcagcctcccaaagtgctgggattacaggtgtgagccactgcgcctgacttcttactttttttttttttgacatatcaatttcttctcagtggcaggagtcattctgggattgccagcaccaagcacaatgagagagcctgataaataaacttgataaatagatgttgaatgagtggaaaaagaaaagggtgagatttgaagcagctaaaataggcctacggaggatgtgctttagaatagaaatggaggaaaggatagaaatggaaagcacataaaagctctctgttaagggccgaattgtgtcccccctaacattcataggtcaaagccctaatccccagtacctccacatgtgactgtatttggagacagggcctttacagagctgattaaggaaaaatgaggcccttatggtgggccttaatccaatcagctggtgtctcttaagaaattaggacacagacacacacagagggtagaccttgtgaagacacagggtgaagacggccacctgtaagccaaggagggaggcctcagaagaaaccaagcctgctgacaccttaatcttgaacttccagcttctagaactgtgagaaatacgtttctgtcgtttaagctacccaatctgtggtactttattacagcagcccaaagaagatttcttttattttcttttctctgtcactcaggctggagtgcagtggcacaatcatggctcactgcagccttgagctcctggactcttgcaaccctcctgccccagcctcccaagtagcttggacaccaggtgtacaccactatgcctggctgactttttactgttttgtacagacagggcttctctgtgttgcttaggctggcctcatactcctggcctcagtgatctttctgccttggcctcccaaaacattgagattacagttgtgagctaccttacctggcctaagatttctaattaaaagaaatcttccccatcttttatttctcatctgttagaaaccaaaagttatttttctccacactcaacttttccttgtatatgaaaatggaaaccattccaccattgacatgggtgggaatcctggcaggtgttttggtttcctgtcccctcacttcagttgagcagttgtgcagcagtggccaagcctgtaggtgcattgctcagcagtgggtcaccagccacatgtacagaacagcactcgctttgtgtctcactgggtctaagtactgacaattcggtgattgtttgtttccaatgtggaatcccctggttctggggccgacagagctggctctcgttccagggcaaacttaacaaacaagttcaaggtgagggccatgtgcactttacagaggtcccacatgagagctataaaaccaagaacctgccaaaagacacgtgaataataggtagtcctgtagagaaagagacaacaaaagaaaaatcttgttcctaagttcactgaagattctagataaagcagatcgagtgagtttcagcaaatatggggtcagggattcaaaaggtagccatgtagtgaagtctgtgcactattccgaacacttggggaattgactgataggattctagtgcatttgctctctgaaaactatatttctgggaaccttcagattaagtacaacatgaaaagatgataaggacggggaaaaaaaaaaggaagaaatttatgcttgccagaatagtggagggaataaatagagcttttacagctctatcaggtgaaggaaatactagaaattaaagcagatattaagtctaggaggaaagtgaaatgcaagatgatcacacagtggctgggtactcaagtgcccttttgaacaagaggcaaaaaaaaaaaaaaaaaaaaaaaaaaagctcaagcctggttctccactcagtcagttatgtggccatggcagtgaaaatgctgtatgtatgcaggcacagtggaaactgtccccagagaaacgagcactcctcatcacagtctctactatgttgtcccaaggagcccgaaaaatggttgccaaatgttaaaaagaaatacccaaggccctaggaaggaataaaagcaaatgtacttgctttcgacttcagctgtttctctcagaagatatgaaaagcaaatagtgtcaattctgagtttatggacattcatagagaaaaatcacctcctcaccaaaggtacctccatgccaactcttagcactcttatatttatatgtctgtgaattccacataggaaatagaacagcccaatgacagcgcctacgtcagcttttcttccctgcattttcagtttttattgaaactatagacttggtaagaaagaaatgggagttcccagatcccagagcagcctcttctcctctttctgttttagactttggtgggaactctcacagaactctaataagatgtgtactgctctatcggcacgttaaatctaggtggtaatttttaagtcctgttatggaagatgctcactcgcactattctggtgcttctcacaattttaattattatgcttagttcttatcttagtccatttgtgctgctatagtacgatatcacaaactgggttatttataaagaacgaaattgatttctcagttctggagtctgggagaccaagatcagggcactggtaggctcggtgtctggatagggcctgatcctggcttccaagaggggccttgctgctgtgccctctggaggggtgaatgctgtgccatcgcccggctgcagggggaaggggggacacgcccctcaagcccttttatagggttactaatccatgagagctccaccctcgtgatttaatcaccgcctaaaggctccacctcttaatgccaacatattgttgattacatttcaacacgtgaattcgggagacacattcagaccacagcagtgcttcctctgattcccttcgcacctttgcaccgaggcttaaacctccgtttcttgttctctcagtgttgaacttaacccctagtgggacgtgtgcctgtttatattttacaataaaggcctctgtgactcactgtgggtgcgtgggctttgaggagtgcagccctaggatgggagcctgcctgggactcttgtgaaacgggacctgcctactgaaggaaactgctttagggagggcttgtgccaggacactcacccttgcagccaggattctcctgaggcagtttatttaatttctttttggaagaaccttccagtttggagcctgggagtaaatgccggctgcttttcatggtagggggggggaagcctgatgctgggacccctaggctgcatccagtgagctcctgcagctccgcacctttcctcatctcacctttcaagcctggaggccccgagcccacagttccttgggatttttcggaaagattggcgcccacgttcccgcccccaacctcttctgtgactactctgggctgcagtttactctcctgggtttcacctagtaacacatttgtatttgctttgtcttccagaaatgtttaaaaatctctcttccctgcttgtagcccacactccagctctctcttttattttattttatttttttaaattatactttaagttctagggtacatgtgctcaatgtgcaggtttgttacatatgtatacatgtgccacgttggtttgctgcagccattaactcatttacattaggtatttctcctaatgctatccctctccttttcccgcaccccacaacaggccctgatgtgtgatgttcccgccctctgtccaagtgttctcattgttcagttcccacctatgagtgaaaacatgcggtgtttggttttctgttcttgtgatagtttcctgagaatgatggtttccagctgcatccatgtccctgcaaaggacatgaactcatccttttttatggctacatagtattccatggtggatatgtgccacattttcttaatccggtctatcattgatgggcatttgggttggttccaagtctttactatggtgaatagtgctgcaataaacatacgtgtcaatgtgtctttatagtgcatgatttataattctttgggtatatacccagtaatgagattgcttccacactccagctctctttaatgttggccattcattctcttctgttttcccttactgtcatttggaggtcttaaaagggtgacaagatagagatagaggcagaggtagaggtagatagagacactcaggggttttctccttgtcctgaggcagccatattgaatcagaactagaacctacggaaactctttaaaaatgacctgatactaaccctatccttttggagccttttttgccccccagattacatggatagactgtaattcccttaaccagcaccactaggaggttgtttgtacattttactctggtaaatacatctgcaatgaatatagttgcatgaataatatcacctgtgcccatcaccacctgtttccttgggatatatttctagaagtgaaattgttgaatcaaaggtggcacctttttaaggctttccatacacattgccaaattgccttacagaaagtttgtatcaagttttcactcccattccatgtgagaactaattttctttctatctcggatgctcttatgcttttagaattgcaaatttggcagcgggacatgtcattttgtttccatttttggctgactttattgttaactacatcactccagctatagggtaaataatggcactttgtttctttaccttctctggctttccagaggaagtgggagcagtaaaaactggagcacacagaatcaatgcagctgtgttctgctcgctgagccggctctcccagaaccagctcagctctgccagcctcaagagcattggtcaaggagtgaggaagggaggggaggatggctctacctcagacctcattctcccttgtgcaatgaattctacagggaataaggggaaaatgaggacaaaccttgggaggggactgcattttaggactaggattgatggaaacagatccagactcacttaatattgtaatatgtccatgggtcaactccaaaccccttgactctgccggctgctgtagagatgaattgcttcacttgaatctgcatcagcccccagtctaagcctaatctttactgcctcctaaggcggtggagaagcagggtttgtgggtaaataaccatttgttattcattcatcaaaccttgagcaaacacttgccatgggccagacactgggctagatcctgcggacacagaaaggaaacaaacatgcccccgctgatgaggttcttagaagctatttggggaatacatatgtaacctaggataactgagcaataattgtagaaactgtaaagcagattacacatgggaaagggcagatctttccacccaataaccaacttgagataaggaagttaagaataaacaccaaggtttttggacccctgctaaagactgaaatatgtttgcaccatctctgcgcatagcatattcttgattatctctttttattttttattttttgaggtggagtcttgctcttgaccaggctggacttcagtgatgcagtcctagcctcgaactcctgaactccagtgatcctcctacctcagtctcccaagtagctgggactacagatacttgacaccatgtatggctgattttttttgtattcttctagaaatggggtcttgctatgttgcccaggctggtcttgaacccctggtttcaagtgatcctcccaccttgacctcccaaagaggccagatacatgcatgagccaccacacacagccaactccctctttattaataaaaataataaaagaggctagtgaaaaaaaaattctaacaaactataatatcttccatcctctccatctccgttgctagtaccttaattcagatactcattattttatctctctaacatgaatcttgcctcctggaatctatccttccagggggactttgattgcatcctctctgtcctgccccgccacccccaccccagaaacagagtcttgctctgtcaccgaggctgaagtgcagtggtgcaatcacggctcactgcagcctcaaccttcccagctcaagtaatcctcccacctcagcctcctgagtagttgggaccacaggtacacaccaccacacctggctaacttgtattttttgtagagatgggttttcaccgtgttgcacaggctggtctcaaactccagggctcaagcgacccgcctgccttggcctcccaaagtgctggaattatagacatgagccgccatgcccggcctgcgtccatattttaatgtaatcaaattgatcattttttcctgttttctaatgtgaaaccatccttgcatttcctacttggtcatgatagctattttaaaatagattgttagaatttctttgctaatgtcttgtttcactattttgcctccgggcttataatgcagactaactcataatctccccatttatgtttccttgtttgatgttggtattgaggttatactgcctctgtccaatcagcggaagcactttctcattcttatattctctagatcgttttgaattggataaagactcttgttcttgacagttggcaaatggtagttctttggcctcatcttctaaaagcagcatttttatacagttgatgcatcttctctagttggcccacaggacactctctaggctgtccttcagtctcacttacagtggaaatgtcctttcctttctgcacttctgccccccattccttcttgcaaagctgagttattggccagacaccaattaaaacagattgttctctcctctggcattgtagcaaagctgtttggtttgacctaaacattttccatttacaataaaaatctacccttaactcactgggtcagtttgctactctgctcttgttgcccctacagcaccttctgtgccactctgtagtgctccccacattgtatgacaatcaatcctacacgtgttttatctccaaccagaacttgagctcagtatacactgtgctttgttcatccttgtacttcccatgctgaagagttgaattctcatgctcagccacggaagtagcaaggatgcaatccatttttgcatcccatttcttgtgccaggcatacacacacacacacacacacaaacccagtaaatgtttgttggataaatgaacaaaatgttcttatcagctaaacacaaacagctcattacagctgtttgtttgttatattatcactgtgtaacaggaggtgctgatgtctcagtcttcatctactttctcagtcttgatccacagttctctgttctctgccttcatgggctgggcactcatccttcttctgtaagaccttccatgtctcgtagtagtatgatttggtctttgctgtcattgcttcagattcttacccacgcattcactctcttattctatttccattgctctgttgctaaggcctcctttctatggttcagatttccttgagcgttttctagaattctactgatttataattcattctagcagactcaacaggaggggctacttactgtaatgagtcacagccaagaaagtctggcttcctggaagcctaggttcccaggcatagcctcccccagaaactagaacaaatgctgtcactgagggacttctcggctctctttcctaaagtttcctgaaatgctacttgaaaggctaaccggacaatgtccactttaagttttagttttgtaaaccactatgtgcaaaccactatatctgcacgtgccaaaggaaaacatatttttacatcagttatttaatatcctaggcaaaagttactttggttcaaatcatccttagtagtgacaccaattctcttgaattggatgtttcataaagctacttctgggaccaggtgcagtggctcacgcttgtaatcccagcactttgggaggccaaggcgggtggatcacttgaggtcaggagttcaagaccagcctggccaacatggagaaaccccatctctactgacaatacaaaaaattagccaagcgtggtggcatgtgcctgtagtcccagctgctcgggaggctgaggcatgagaatcgctaagataagtaaagaaagctacttctgtaaaacaagcatattatctttttaaatgaagcaagaaaataaggctgggcgaggtggcttaagcctgtaatcccagcactttgggaggatgaggcaggcagatcacgaggtcaggagatccagaccatcctggccaacatggtgaaaccccatctctactaaaaatacaaacattagctggacatggtggtgcatgcctataatcccacctactcgggaggctgaggcaggagaatcgcttgaaccagggagttggagggtacagtgagccgagattgcaccactacactccagtctggcgacagagtgagactcgatctcaaaaaaaaaaaaaaaaaaaaaagaaagaaagaaaatatagttatataaacaccaacagaagtatcaaggatgtgttacaagtttgcagatttgcaaagtgttctccgtggttatgggtttgatctttcatacagattacttgagggatgaaaatgttttctacaagtctgaatgtggaagagtaattcagtttcttattagtgcttatctaagaggtgcaagacattcatatgcagtgtagaaggacaagtgtagactttggttagattgtataattcagatgtgctacaaggtgcaacagaagctttccagaaacagcttttggagagactgcccgccagttttttgaaagcctacaaaagaacaattgatattcctctttgtgggggtctgtccaatcagattgtgaatctttctcattgctttctgagagttagaattgattgaaaaccaatatgcgagcatatagaagctaattcagtgtgcacgtgtgtgcctgcatgtgtgcacatgcgcgtgtgtgtgcatgtgtgcacacatgtagagcctgtcctagtgccttaccacagcagactacttggtgagcaggaaagagagctggccagcacacacttggcctggtgctgcctccactgtttctcttggcatctcaggctgtcaactggctgccacattgattcaaggctgtcatttttttttgtttttagatgatttcttccatttttgattttttattttcgaaggagctcaaggtcaaactctccttagttttttttttgttgttgttttttgttgttgtttttgttgttttgagatggagttttgctcctgttgcctaggctggagtgcaatggcacgatcttggctcaccacaacttccacctcccgggttcaagtgattctcttgtctcagcctcccgagtagctgaaaatacaagcatgcaccaccacgcctggctaattttgtatttttagtagagttggggtttctccatgttggtcaggctggtctcgaactcctgacctctggtgatccgcccacctcggcctcccaaagtgccgggattacaggcatgagccactacacccagccccttggctttgttttgagcccagcccaggttgagtcctggtgactctgacaggaggaatttccagaaacattgttttaggggaggagacaaggtttcttgtttgccgtatatgctcctgcagagaagaggaagtgaccgtggaggccatctggccctgtgttttgatatggcaaaattaatgaatgcaatcagaagacctttgagcaagaaagtaccctggaacaacccaatttggactgcaagtattagttgggtcttccaggtgcctctcacagcagcagtcatggcagcagtgactctagccatgtccatgaccaactgctgcataacaaatagccccgagactcagcagcttacaacagggtccccagcccacagactggcactggtccatggcttgttaggaacctgactgcgcagcagaaggtgagtgagcattactgcctgagctctgccacctgtcagatcatcaggggcattagattctcataggagcgtgaaccctattgcaaaccgcgcatgcgaaggatgtacgttgcgtgctccttatgagaatctaactaatgcctgatgatttgaggtggaacagtttcatccccaaaccatctctctcccttcatgtccatggaaaaattgtcttctacaaaaccagtccgtggtgccaaaaaggttggagactgctggtttacaaccgcaatgaacattcatcatcccacacagtgtcagagggtcgggaacacgggtgccctgcctgtgtgcttccggttccagatttctcagtgggttgtgatcaaggtatcagcggaggccgtattcatctgcaagcttgaccaggaatagaagagccacttcatgggtggctcactcagatgccagcaggtcagtgctggtggctggcaggcagcctcagctcctcacctcatggatctctcctgagcacagttttcctgtccttacaacctggtagctggcttctccagagcaggtgactcaggagaggacaaggtgagagccacagaaccttatgatctagtctcagaagtcacacgccatcatttctgcaatgtcattttggggttccaggtcagctgtatcactgtgggaggtgagtatatagatgtcctagaccattcaggctgctatgacagaacaccatgaactgagtggctcatgaacaacagaaatttcccacagttctgtaggctgggaaatccaagatcaaggtggcagcaggttcagcgtctgctaagctcctgcttttcatggattgcatcttctcactgtgtcctcacgtgatggacagagcaaatgagctctcaggcactagtcccagccatgaggactctgctttcatgactcatcactccgcaaaggcccacctccatcagaagacagctgctaactgcagctgccatcctccaagacgggagacacagaattgggggacatatacattgagatctgaaaggcctggacagcagcaggtggggatcgtgggggcatcttggagggtggctgccgcagtagcatttcctgagcccatgctttctgccttgcactcatctcctgcacttgatcttcattatctcaggcagtccccacaacgactgtatctaggagttcattttaccctcattttacagatgaaacgtctcagagggtaatgtgcttgcccagtgtctcacaaatgcaaagtcactgaggtaggatttcaacctaggtccaatcatctctgcagcattaggggttcaccattgccatagacttaactgtgtcccccaaaatttgtatgttgaagccctaccagccccccccccccaatgtgctgatgtttggagaaagggcctttgggaggtaattaggtttagatgagatcatgagggtgggactctcataatggcattaatgccatcaggtgaagagataccagagaccttgtgtcctctctctctgcaatgtgaggacacagtgagaaggcagctgtctgcaagctgggaagagagtactgaccaggaacttaatcagagggcatcttgatcttggacttcccagcctccagaactctgaaaagttaatgtctattatttaagccacgcagtctatggaattttgttagagccaacccaagcttactaagataatcagtatgctgcactttctataaatgtaatttttacatttataaaaacaaaacaagagatttgctgctctataacaactgtacctacattgtagatggaataacaaatctacatacagatttagtaatctctatgtagatatagaacatagtgtatctaataaagacatagtgtctgtggtctgatgttaattttaggaattagccgtcactgattgggccttgtccaggtattcttctcccttgtcctggctctgtaacctagttatccttgtctttgctaacccataaccaactattgtatcaggactattatgccactacagatgatgcagtttgggtttactgtttctcaccatttagacaatacttcatcaaatatatttctgtatgactttagtgatgtcagtttttgattcattcctgcatagatctgggcaaattgtagaccttaggaggtgtattcaccatccagttctctggaactgcttatgacatttttctctgagctttcttgtcccaaaaggagccttcctaaaatagtctttaagtgcctttaaaaagagaaagagaaattaagagaaaaaaaaccccaaactcattcctttactctgatgtgacagtcctcccaggacactgcagtggcctgagttttgctgttaatttcattcacttatgtttgggctatgtaaattctgcctagagctggaatgtcattatgtaaagaaatattttttgtttatattctttaatagtaccagtaatgtatatcttattcagcttcgagaatataattgggttgtttataaaaaccacacatcatcaaactcacattgtaacgattatttcacttttcaaaaaaaatggcattagaaaaacttgaatgatgttagttatcttaaagaagtgtgtactatgtttttctggctgtcagctccatttgttacaaccaactacagattataaattggttgatcaaaactctaaaacagaaaaccacaagccccaatattatgaggaaatctggaacagcacgtaactccaaacctgagcgtagaccaccactgcagaagccaggtgctgggaaaaagcactctgtgttccaccacctgacattgctctgtgcctcagagcactcactccccatcatggtctctttttaccaacaggggtctaatccctaatttatagataagttatttctaatttacaacagaaaaatgccacatgtacaaaattgcttatgcattgctgaaaattacaaaactactcttactagttactcctggcacgtgtggattatttatacctgatatattcaggaaacaaggaattcctaagcaccagaagctcaattcactgaaatgtagaatcattacaaagcacatgtcagatgtggctcattcattccaagcttgtagcctgcatcagtctcctaggtggtttattaaaacacagatgacttaagccccaccccctgaatttctgacccagtgggtctggggtagggtctgagaatctgcattttcaccaagttcctggtgatgctggtgcagtagcttcaggaagcacaccccaagcaggactgcatcactgtgtttcttagggagagggaccacatgatagtcttacccatctgcagccctggtgtggtgcctagcacataatcacctctcaatagcaaataacagcaacaggaagaagaactaactgttatttggctaaccacacgctggttcccgtgttcagtaagaactttacaaagattccaactctgtcaggtagacgctacatttttcttttcttttcttttttttttttgagatggagtcttgttctgttgcccgggctggagtgcagtggtgtgatctcggcttactgcaacctccacctcctgggttcaagtgattctccttcctcagcctcctgagtagttgggcctgcaggcgcctgccaccgctccctgctaattttttttgtatttttagtagagacaaggttttaccatgttagccaggatggtctcgatctcctgaccttgtgatctgcccgcctcggcctcccaaagagctgggattacaggcgtgagccaccgcgcccggctgacactaacttatgttcccattttatagagggaaaaatggagccttagagaggttaagcacctggctcagaataacatggccagtttgtggtgggcccaggaaaaaaaagggtacttgagccatgttcccaggaatattttaaaagaaaaaaattgtatacaaattcaacagaaaagttttcaaattgatattgagggagaaaaaatcattgaccaaacttgactttgcaagccatatttttactcagcagctgctagatgtttttcagtgggtccagacatgtaggataccaccttcatgggcatctctcagagcttcttctggagaatgcttttgctccaactgaggtaaacatctgtgagaacctctgcatggtgtccacagctctctaaagggtcctcaaaggcagcccatgacttgcttagaacagcagagcccctttgcaagctttgtctcatctgtgtcttctaacttagcaaaagaatctgaactccttgcggtgagggtcttatctcctggcttcactgtaaacaattcaggattcctgcagtagctgccaaggaaggaagcctgggagagcttcccaaggcccaagacccggccagcccccaccgtgcatggcaggcagagctaattctccgtcagtctatgcatgctaggagaatgctttgggacaatgtcctgatagtaaacaccatgctgtttaaacagaattcccattagcttttccatgagggagcaaatgcagaagttttcttcagatagcttgcagtttctcagccatccccagccccacccccacagagtgacaagaaacaatcaccaaatggccgttgttccattgatctgtttatttctctgtctttggggcagatggatcaggtgcaggcctgctgtggtttgtatcaggcacttaggcagtcctcagccctgtctccctctgttccttcctccctccccggaaactcttgggattctgtttccgcctctgaaaaaaaaatcaggattctactactactgtttaatttcctagtaaatggttattgagaaattggagtgtaactacagggaaacactgcagactgtgaaagacccacgtctttgccaagcagacgctctgggcaagtcgcctgggtcactaactttgacactttggctgtgttgcttttctttggggaagatgtatggctaagctgtctttacttgcctgtgtccctatcaggcgcagcagcagtaggagttaagtaaaaggagttaaatttctccaccttttgcacatcaggagcatggtcttcagggtcagattacctggattcaaactctggctacaccactcactagctgcctggccttgggtgagccactataccaccctctgcctctgttttctcatgtgaaaaggggggacagtagtattatccagttcctgggttccatgaaggtgaaatattaatgcttatgaattggcacaaagtaatgctccataaagggttgttgttattacaaaagcttaaaatcaaaattaaggtatcctctttaaaaagtccttgcacatgtttagaagctggtgaggctgccaggtgttttcattgcctaccaggtacttacagtttaaaagaagaaatggggctaaacatggttggagggaaaagtacactgagttctattcacaaaggtgaactcaggtactgcgctgtcacgaaagagtggatggtactgactgtgggaagcttcctggggtctaggtctgaggaataaaactgcaagataacaaacgataacgaggaagtaggagtgcttgcttgcttttcttttctttttttttctgaattaagttcttttaatagattgcatatatagatgttcagccatacccttagatcaactcttaagagtagaactttatatccaattaaatgctctagataccacctttcttattttttacagtaaggtctggtattcaaatacccacttgtacactgacagctttaagaaaagaggacacagagggagctgtcatttttagcagcaatgaaataccactaaaccctttttacataccgaattcaagtcactatcagaggtgagcgcaccacaaagtcagcaggtacaaaattgctagttcgtttttcaattaataacttgaaattacccttgcctcacaccccattacatctttttataaacagcaaacattttgctattttatacataggctagcaggcttgtttcaatatgaaagtgccaattcatttcctgatttttataatcagttatgtagtgctacaataaatgaccaataatctacataggaacaatgatgaatgaaaatgatgaagattgaataaagctatcagattaccttatcttattgacatataaagaatagatacccaatggtgaggaagagacagaaattggacaaatgctcataggtgtaaaaattacatctacctttgagttttatactgcaaatgagacattttaaatagtcctgtagcccttgcctattctttcctcagaaaaagaaaagctgccttcatgacatcccctcgtgtttcagatttccacagtgtcactttgaagcttcacagtcaggatcttcctttcttcaaaaaataaagaaatatgccccctaaggtacctcccatccccctcgatcccccaaaatcccgctggtttcttttccagtgccaggttgcatgatcgggtcccatctcctggggttgttgtttcttttgtccatctattcatcattagtttagagtagataacatgaaccacttctggaaccactgctaggacgaacacaagctcttcactacaatcacacagcaggaaagaaagagataactcaattcatccctggtgctgggcctccaaaattgaaagaacttggcacaactggagcactgaatttgtatcctccatgcttctcaatcattttggattcatgggctgctcttctttgatcagccagcattgctatatactgtaactgttttctttgttcttcagaaagatggtgagtcagagcctgataccacacaggattacgattttgaatagtttgaaagatagtttgaaactattcaaactatcgatttgaatagtttgaaagatagctttaaatatctgatacacatcaacagggttatcttcatcatcaatgattgtggaatagccttccagagcagtctcttccgcatcatcttcttaccagtcttcatcgtctccatcttcaccagcctgcttagccagaatctccaaatattcttgcccatcttcatcaatatcatcttcatcactccccggttcctctggtcagtgccacgccctttgcactgcagagcgatgacctctaacaattttgttgcatgacactctgcatcttctcctgcaactcctgtaagaacctttttgcacatactgtatatcacttcaagatacttggtgacagacagaagtgtgtctgtatcaactgttacataattacgaaggaggagcatcatatctgtaaagtaatcaaagccatcttgctggaagacttcaaatacaaggggaagtagctgccacatctgtggagactctcgttgtcatgtcaaactgtgcactaaagagaagatctcctcatagaattctaagacatgctgttgtaaaacagtaggaacgacctgtaagcagattccctcgagctgttgggttatctcttaatgatcttcagctacactaagaagcgtgtcaggtgtattcagaattcccatagcagtaactgctttgtcatcactaccttcttcatctggccccatctggattacttggttaaatgtcattgccaaatgttgtgtcatttctactgcaataggagtaaattcttcactatattcacagatcattttctgaattgcatgggtaaggtcatcattttctgtttctctgataatatgaagaagagcctgcattacaggtctgatgaatggtgtgatatattctttagctttttcttgattgctgatcaatacttgaagggcaatggcagcttccactttcacaggcatttctctatcatcaatcagacatcttcttgtcagctctaaggctgtttgaaggttctgatcactttcgaacttcacttcacagaaatagtgaattacccagcaagcccttgctctcatgtagcctagttcactgctgaagagggggagtacatgattctgcaacatgcattccatctgatcgttatagatctttttcttcagaagtatttcagcgaaagagccaatcatatgcagggctccatctttttttcgagggtcagcatttggttctgtaagaatctggtaacaaaatcctatagtcttttgcagtacctctttcctcttactacaggctgtaaacaaaagtgtctgggcagcagtggtaggagaaatgaaatcttcaaacacatcaaacttcatgcatatatattcgtaagggtcttcttgccaaagttcctcatcagcatctgtatagcacatcagtggaaaaataacatcttggataatgccttgtatatggggctttggattcttccaggtgagagcatgagaaactccttgattaataaaaattacaaaggcagtgaaggcccattggggaatatacaggaatgtttaaagcagaaaataaaactcctccacccagagatcattgttaattccctaactcatttcctctttcaggcttttgagataacctgggcagactctggccatgggaaaggaaggctcaggggccctgtgagatgctggtgccgtccagcttggctccagctaggaaagattgggcctggggtcctggacacacagaaagcaatgggatttgtcagaatcgtcaccagcttcctctaagcctgggcagcagagtcttctaagcacccagcaacatacaaattcaccaaagaaagcagttattagagttcatacagagaaaggagctgatgataaactgattttcggtttttaaagatttgtttggtgtattaaaatgtgtttttgttgtctttagtagtctattgacaccaccttagaatctctctcattcatttctcatctataagatgaggaaggtaacagccacacttctttctcttaagttacagactcccagggagcaggttgctgaaagctctttcaggacacagtcgaggtgtagagccccgtcagtgtctaacataacagaaggacaaggtggatagaagggcaaggtgcctttccagggcagctgcagagtatcagactttctcgaaggaaggtggatggcctggtgggacgcagtgctctcatctagattctggtgagaatggcagtcctggaggtgaatttagtcatagtccatcaaacaagtctaattggacatggcattctacctcttcaaaagctaaacagcccacttgacagaagtttccaagtttggtttagcaattctatattgtatagatactgcttttgtctgttgtaatgaacaggagttataattactccaaggtttgttctttttttaatgtgtacactacttttacatcatcaattgttggtccattttgttagtttcttacattccacatagactagtctgaatgtttgcagtgggatcagatgttactagcatattgtcagattttttgtcttattttttttctatcacagcctgcctgcctgcctagatctgtagaaccaagtctcattcaggtcaaggatcaagtgcttgaaaggaactgaaactcattcatagggtcagagcgggtggtggcagacaggaaacattagagaatgtcaggcaaggcaggggctctccccggtatttctcccaatggccccattgtctctcctctctgccatttgtttcctttctctccaacccctggacccataccctctgtgaggctcttagtttctgctcccgcataacatcagcttgcgtggagaggccgctacactggctctggaatcggtgcttagtggctcagggctcacgtctcttgctttcttcagcagaggagcctgggagttgcatctcctaacacggcgggagagggaggagccccttgacttagagtagggaaacttcctgtcattcctaatgagactcaccttattgtcttgggaaaagaaacttaggacatttcaagcctcagagtgtaggcaagaggcaaagcaaaggcaggaaccagggggcatggagggtatgtactgcaggtttctccttttccacacctccttcagcatacagaatacacatgatcccttcaggggtcgtatggaccaacctaaaccacccccagcacagtttctaaaattcaccaaccaagtggtttaaggagcgagggagaattaagcagagttctcagttcacctagtgagaattactagccaaggaattcttccttgacttaggtgagattgtcaagattcaagggatggacgtttttgttgctcaggagcaggaaggaggcaagagttcattttggaggtgaggaataaggaggagggcagcccaaggaaagttgcgctttgaaggagcaaaaaggaaccaggaggcagaaggacacaggaagcctagtgctgttgttgacaataggtgctcattaaacttctggtcaattaactggaagagtaaggaaaagacgaatggaaggcaaaagggggcccactctggaatgtggatttcaaatgttccctattgcctatgcttttccctgcagctgagagcagctgcctttggctctgctcctggcttgggccctgtggttcttggggaggtacgaatagagcaggggagccaggagccctgtatcaaacaggcgagagtcttgcatcttcctttctgatgcattctagaagtgatgagaaagcatcttcctccactcccagtctgttgcaagatcctgctggaattccactcacttctctgccctcacttgctacagggacttcctctccaggatgaagtcatgggggcaggagccatggggagcctttgcggctgtgacccatgattgagtctgggggaggggtagctggaggtggggtacagcctaaggccaatgaaacagtttttcacagcattaacttaatgggaaatggagggactcacaagcagatcttggacttatgactgccacactctgctctgacctgtggggctgacagattgctcctcagtagatgttggacttgggtaactttctccttcatgtcccttaaaacccacgacaattgtgtctattctggagtttccctggcaagagaaagtgagcgaaaaataagcatttacgtatatatatttgtgtgtgtgtgagagagagagacagactcccagggcgcaggacagagacaggttctgtcactcaggctggagtgcagtggtatgaatatggctcactgcagcctagagctcctgggctcaagggatcatcccaccttagcctactgagtagctgcaactacaggtgtgtgccaccatgcccagctaattttatatttttttgtagagatgcagtctcactatgttgcccaggctggtctcaaactcctgggctcaagagatccacctgccttggcctgtcagcttggggatttggttacaggcatgagccactgcactcagtccattatttttattattaacttagcagctctaggaatctttaccctaaacgttttctctctctagagatcataatgggaagactggagattgtgaaatcaaacaaaaatgggtttaaatcctttcacatttgttatctaatgtgtggtcttatctcatctctctgagaccagttccgaggtttgtataatgaagttagtaatattacctccttaaagcattgaggatttaagtggagaataccagtgttgaggtagaaatgccagtcaatcctggcaggaagggggatgactagaggactgtttaataagggagttatttacaaaggtgtggccagggtaggaagcaacagggacagagcttacccaggctggtagcagtgaggccaccctctccagctctgagggggtgggagtagggcattgccagaacctgccttgcaggtactgtgtgacctttagtcaagagacaaagccatcccacaatgacaccagcagggaggagttgacaaccagcgtcatttccttctctctccctccagttccctgcctgggctccctccccattgctgaaatccaaccagaggccagagggtaggggagcccccgtaggtagtctactgagaacagcctctggggacagcagctggagaagggtgaaccatagagtgaaccaaggagacagaagatctccagcacagcaagagctcaagaaatgagatgactgtgatgagtcattcaagttcagtttagagccttccagcccatagctggtaagtttcttgagaacaggcatttttgttttctcacaaagcattggtaaatctccatacagataatatgcgcccatcaatggttgctgaacagtgatcaggttctgaaaaaaagcaaaaaatactgacttgtgagcaagtttaacatttgaagttcaaagacaatggtatcataaatttaaattgcacagcaaggaataaaaacaagacaggcatcaagtctggtacagcttcatttatttcttactcttcctaccgaattgagtttgcatccaggtactcctcatgcctccgttggcagaatgatgatgtaatgaacgaacagcatttacagtaaatgacagcaaattgctctgtaattcaagggctaacccatgtgccacacaatgatcttttgatgtctgtgaatttcttcaaggtgggtggggaagctttttgcttgtagggaaggctctggatggactgagcctctgacatatcaactgtaaatcctggagtcctggggctttattcggaggaagaaagcaccttctacaggcagcagtagagtggactgtcccagaatcgagcccactgccctgagaattggactccacaatggccagttggacattgtccttgtgcccggaggggtgacctacacgtgggacaggaaaggacattgtggcttcatcaccagaaatgctctgccaggtctgtccttctggaacttgcctaacctgctctgcaaaggtttcaagatgttctaatgcatccactttaatttattcaaaccccaatgtacggtcagatttttctggcttctggctagctaggtgaagagaagggtgttgctcagaggtaattaaatggtggggcagagccattaggaaagtgcatgggtccaggtcatgcttctcaggcctcaggtagctttctgagaatagcctgtctttcggcatcccaaactaaggcctccacagccacgccgggccccagaaatctgcattctaacactcctcgctgatgtggacaggccttgttgtggaaacaggactcccgggagcaagagaaccaaaaagtatatttcaggagaatttaaacataaaaaaagtcctaccttatttaaaaaaaaaaaaaaaactgcttacttcccttaaaaaatacgtacctaaggttagccacttgcacttatttgtagaataatcgcattgtgcttacatttcttgcaagcaaaatgtcattttattaccaattgatctggcaagaaaacaagtgagctaaaacctttttatacttttttttctcacccaagatcaagtaatgattggttccactaaaggcttagtagaacagcccatctgtgtgactgctgcaaaagtgggtgacaaactctacaccggggtaagtgaccctttctgttgttgtcaccctgtggcaccgcaccatctgtttgttgaattcctctgataggctgacttctaatgatcctatactttaaagaagtggcttctgcagcatgggctttcaatccaaagtccaggtggtgtgggctgaaaaaaggaactgtccagactctggtgctagtgtcgggtgggtttccacagtccacgctgaatgctgggggtcagaggagcagccaaccatcaaagtctgagtacagcgtctgtcccatgtgagcatgagggaaagggaatcccagatctgactttcatccttcaattcccatgctcaattatttttaacttccatgtttcaggatggaaaaaaattgccaaaacacacagaacaaggcttgtccagagaatcgttgaggatgtgagaaaaagtttaaacttaaagttcttatggccctcaaccttctggagttagaggaggggagagggtgatttgcagaccggaggattgctggaggcctaaccctgaaattagtagggacaggtttgttatttggctgaatcacctggctggtgcctgcctgaagtcagaggagacgggcagggccaccctatgtatggaatcaaaggaagagctagtggcttctggttcctggccagatttctgtctgtttctgctttaaataggctgtgtacacccaaaggctgtgtgatggacacatagttattattcaggacataagacaaacttttgcctggcatcagcttaccatgtggccaaagcctgcctcagtccctgtatggtgagtgctgttgtgcctgttgtccgtgtcccctgggctgaagccccatgccacagctctgggacaagggtgggggattaataaccttaggacctcgcaggaccctggggtcccagcctttggttgcctgtactgctcccgggtggagaaattcacctgggagtccctccaggtcctctgtggattagggaagtgcaaagaggtgggtgaggtagccaggaggctactccacacagccctttccttcaggatgttttctttctgcccagagtggtggtgaacacacaggctgatatcatccctcttttgcagggtctgtcctggctgaggcaggtttgcaccctgcctgggtgctcagcacttcgtgtgaagggaatcattcagggcagtcacaagcccctgcacccgggagtccaccctggaagccaggggctggcccatggcttcacacacacggccagtgggactaggactaagtgagcagagcccagttcttctcgttcccagtgtgagctgatgtacaggcacctccctgtaactggatcaaaaggggactgtttggcaaatacaaatcaaagcacagtctaggacccagccgattagagagaaggcatgaatcagagaagagagaaaatgggaagaggtcagagataaaggcaaagcgtggttgatgagaactgcagaagtacgtgggaggggtcagtgttctgatttattgactacctttcaactcattgtttagcgtcatgggaacaaggcgtttatcagacaagatcagaagtttaaaggtggccagctttatggggttaataactccatgtccatgttccctaagtgaagtgaatagttctttgtgctgataacatgctgacggtttaacggtggtttagaaagagcacagaccacatgtgaagaagtaaccacttaccagatgactgtgaagacagaaatcaacagaacctgcaaacacgctattttcctggacctaaataagtgcccattcagatggtgactgctttttaaaacctttatttttctctctataggcttaacatatgtaatgtaaggagccgggaatctctgcaggttaaactgctgaaaagaaagctctgatgagctacggaggaatgagacagagttcttacacaggggtggagcgggggacgctttctggcttcatcgtgattcacttacttgccttcgtgtgagtctcctccttttctgaaataaaacccatcctaaaggacaaggattgttcagtaaggaaattcaagagattttcatataagcttgaaagtaatccagaaaaggaattataaaaatgctttgaacagtagctgtattatttaagtccacttattaggtggctgctttgaagagacaaatgtttattggggtttttaagttcttgtgcatttgtttataggagagagataaaggaatttccatcacgtatgggcatatcttgtcttgaccagctagtcctctttcctatgatgcttcttggacttgtgcagaaagcattgcccctccttaccccagggccaaggaccagctgacttctcacagggctgactcacaaaaccatctacccgaagcatctctacttacctgacctgggcactgaagcgccttatcttgtttacctcagaatcctccaagggcatggaaatcactagaaatcaagacaagtcagataaaaggattttgtgctacttccaggtgtccaggaggtaaagtttggatgctgaaatgtcaagatttacaagacatttcagtggcttatgagaacaacagaaccatgtacttgaagtggaaaatataacagaaaatctggaaagccacagctttcatacagctgtacaaatgactagattattgctctaacatctatctgaggaaataggagttttgctgaaggatagggacaaccaatgtggaccctggctgtcttgggaaattgtaacacttttggggtggcaactgggaagagagaggatgaggacatgagaaggcagggtgttaaatagcaacataaaacaagggaaggcagattagagaggtaggcagctgtggcagacacagccaaccatatttccctcataacagctcacatatcccctcagggtaccaatgtgctcagcttagaacacacagcttccctgactcccttgcagctagggttgactgtgtgaccaaggtcagccaatgagatgcgcttgagtgacagactgaggcttctgagaatgctttttgaaggagaagtagctgacatgtgttacttggattgtttccctttgcccttctcccttctccctgggcacagagctggaatgcagaagtaggaaccatcttaatgctacaggataaatgccacatgctaagtgtaacagaagagaaatctagaacaagcctggaaactgatcacactgcagagctgccatgcagccttgaatgacttcccccaaaaaatcttctgttataggagaacagtgaacctctattcagttgagccatcatgctcaggcttcagtttcatagggccatctggaccaagtcctaatttatgctgtactccaatatatcagaccctggacagaaggccaagaggccagagtttcagtcctggctctgtcctggctgtccttatttatgagtgtgtgacttaggcaaaccacctaggaccccaagcctcaaattgggggtaaactaactgccaaaacaacatctcacagactgtgttgaaactaaaattatttaaaagtatttgaaaagtattaacattattaggaaggtaaagaaaggggttaattcagtaaggccaggcttaagagaagacattaagaaaatgtggtgtttggaattcaaagtctaggaaaggatggccgggcatggtggctcacatctgtaattgcagcactttgggaggccaaggcaggtggatcacctgaggtcaagagttcgagaccagcctggccaacatgatgaaaccccatttctactaaaactacaaaaattagccagtcgtggtggcacacgtctgtagttccagctactcagtatgatgagggcacgagaatcacttgaacctggggggtggagattgcaatgggccaagattgtaccactgtacttccagcctgggcaacagagtgagactctgtctcaaaaacaaacaaacaaacaaaaacaagtctaggaaaggaaacttcatacatagcacacctggagatgatatgacagttgaggccagggaaggagccaacattagcaatggattcccacgtatttccagcgggcaggtgggtccagcagcagatgtagccagagatcctggtacccaaaggcccagtgggattagactgtgcagcctatacagaccagatgatagcacagagatcaaactgccccaccacagaacttcctctctgcacaggttgaagggaaagagaaatgtgaaacactaagtacttagcccagtgagattaagttcatctggtagagattgtgtaagcccagttggaaatagtggctcctgggacatttgagatctattatagaaaataaagttatatttctctgtgtatttaaacgttgtaaatttcagtgcctttgcccatagctacagaaagcttaatgtcagtgggcacaggaaggacagacagggtcggccctggaactagatacccctgctgagctcgggcaggtgctagggatgcctgaagatgagggaaaaaaagcaagtcatgcaggtaaaacacaatagctagagacaggcaacaggtggtaggtaggcgtaaaggtgtgtgtgggatggaccataacatgtgaggaggtggagtgcagcacagggaggcccagctgagctgagcccagcagagatattagcagacagctgtgggggaagctggccatacctacagaaccagagcacaggggaggagaggcagaatagtgccggggccacaaaaaggaaatagcaagagaacacagagttatggtccaaaggggcaaggggacagggcaaacaatcatcggcactagagcgagtccccaggatgtggcctccagaagaagtgacagcctgcgtagaatcagacagcgcatccagagtgggggtttcgtgagcaacgcttcatgtatcctgtctgaggagggggctgggtcgagcccctgggggaaggctctttctgcatgccttccagaggttgtgctaagtgtggttgctggcgggaggtggggagcaggtaggaagatgtagcaaatggtccaaacggagtgacaaggtagaatggtacccagatagaactctgccaggtgagaaatgccaagagagctgcaaaagctgtgtccttggctgtgggtttgggccaatgaatttctctccccagcatgaggacttcgctgcctttatgcagggagtaatggtagacagtgcctagtagatttgatatgttggtttctggggcttttccaagtaccctaaaaccacaccatgaaaagtgtaagccctggcccccttcccagtgagtagttatcctctggaagattctggtgcgctgctcagggcatcgaacaagcccccggctgacttcttgctgttgtttatcacagaggcagatgggtgggggtgcgcctgctacatagaggtcgtatggatgccgagagcagcacatctctttttggcagcttaagccaggcctggattagcaaagcatcccaatgggaaatgcttccaggagagaggaaaattggtttgtttttttagcacggggagtagcaggggaacatcagtagagaccctggatatgccatcttgatagaccagaatggcttttactcatttaagaaccactgacttgtaagagcagctggtcgtgacccactgttccagccctcaccagtaccaacattgctccctgagcctagaaaacatgaaggctttgttcagtgattttatggcctcaggagagcttcactcgttgttatggacagaatgtgtcccccaaaattttgcatgttgaagtcctaatttccagaacgtcaggatgtgaccttatttgacaataagatcattgcagaggtaattagttaagatgaagtcattaaggcgggctccaatccaacatgactggtgtccttaaaaaagtggagacttagacacaaagttatgcatagaaggaagatgatgtcatgagatgcagggacgagatggccatctacaagccagaaagaaaagacagggatagattctccctcatagccttcagaaagaaacagccctgccaatgccttgatctcgaacttctcaactccagagccgcaggaaaataaatttctattgtataagccacctagctcgtgatactttgttaaggcaaccctaacaaatgaatacactcattattcgaaaaaaaaaatactttttcttctctcatcttttcctctgatgtgcaataattaggaaagagacagtacaacaattttgaacatatgtatttttgatagaagtttgaaagctgggtatcctctaaaatcatatttgttcacagcaagattgaaaattatataatgtgcctcactttcactctttaagagtatttttaggtccaggtgcagtggctcacgcctgtaatcccagcattttgggagactgaggcgggcagatcacgaggtcaggagatcaagaccatcctggctaacacagtgaaaccccatctctactaagaaatacaaaaaattagccgggcatggtggcaggcgcctgtagtcccagctactcgggaggctgaggcaggagaatggcgtgaacccgggaggcggagcttgcagtgagctgagatcccaccactgcactcctgcctgggcgacagagcaagaatccgtctcaaaaaaaaaaaaaaaaaaaaagagtatttttagatagagtttattttctccaactataagctttttgctaatccttagaattactgctgggtgaggggaactgtaaggaaatgccagtgtatttactgaaagtaaatgcttgcaagcttaggatcatctggagtgattcctcagcccgacctgaggcaggcatattagcctcacaaaagtttgcaaattcagcataatgtgaaagaaaaggagggctgggatatttatttttaagtgaatcttttgatctcctggaaacaaagtgttcactttcctgagcagaattaagctcttggttgccttgaaccagcagcagcctcagaatttgctcagagagcatgaagctcagttgggctggtgtgggagagaagttttcctaagaagattattaacaggaaataattcatctgagtttctgaatggtctttcattgccaggccacaaaaattccttatttttaaataaacaatcatgtggcttatgcctgtaatcctagcactttgggaggccgaggtgaggtgggtggatcacctgaggtcgggagtttgagaccagcctgagcaacatggagaaactccatctctactaaaaatacaaaattagccgggtgtggtggcgcatgcctgtaatcccagctactcgggaggctggggcaggagaactgcttgaacccaggaggcagaggttgtagtgagctgagatcgtgccattgcactccagcctgggtaacaagagtgaaacttagtcaaaaaaagaaagagaagaaagaaagaaagtgagagagagggagagagaaaaagagagggagggagggaaagaaaggaaagaaagagaactaggaaatgctcagaaaaaactgtcagatgaattctgtatatagactttccaaagctaatttgatgggctcagctttggggccacgatgttcaccaacgttgtggattctctgggcctattgggctctgagagataggccccagcacaagactggcacatagtaggcccacaggaaatatttaaggagtgtgaatggataaatggatttggatgcaacaagtctgaattgtggatgcaaatttgattaaatatgttctttattttatttatttattttttttttgagacggagtctcgctctgtcgcccaggctggagtgcagtggcgggatctcggctcactgcaagctccgcctcccaggttcacgccattctcctgcctcagcctcccgagtagctgggactacaggcgcccgccactacgcccggctaatttttttgtatttttagtagagacggggtttcaccgttttagccgggatggtctcaatctcctgacctcgtgatccgcccgcctcggcctcccaaagtgctgggattacaggcgtgagccaccgcgcccggcctgttctttatttttatgagagataaggtcacatgcattagagacaggtgttgacatctggtagtcactgtgtgaacttggcaaaattatttcacccctttgggcttcagttggggtgaaaggccactgaactgaaagaagaagacatgggctccagccctgggtttgccaggggcctgctcctggctgggcctttgctgtctctaagaatttactagtccagaaaggggcagtctctcttcagccagaaaggatttttaagatgtcaaaacaccataatatacagaaaactaaaaatacttacaaccttctttacattctgcttacataatatcaagaagtaactaagtccatgggcagtggctcacacccatgtgatccagcactttgggaggctgaggcgggaggatcacttgaggccaggagtttgaggccagtccggccaacatggtgaaaccccaccactacaaaaaatacaaaaattaggcaagcgtggtacgcatgcctctaatcccagctacttgtgcggctgagacaggaaaactgcttgagcctggggggcggaggttgcagtgagccaagatcatgctaatgcactccagcctgggagtgacttcaacagagtgagactgtctctccaaaaaaacccaaaagtaacattaagtatggtcaagaagtactgtgctctttgactattttatgtgcgtcatcagaggttaggacataagaccaaggagagtcagagagatgggtaactaaacagctctacttgataaagcctgacccccagtgatgtttgatgactggttgttattgtgtgttcttgaaattttactctgcatcttttgaatctggtcagttgcctggagatgattataaaagttttactgggccaggcgtagtggctcgcgcatgtaatcccagcagtttgggaggccaggcaggtggatcacctgaggtcaggaattcgagaccagcctggccaacatggtgaaaccccatctcttctaaaaaaaaaaaatacaaaaattagctgggcgtggtgacgtgtgcctgtaatcccagctactcgggaggctgaggcaagagaattgcttgaacccagaaggcagaggttgcagtaagctgggatgcaccattccagtccagcccaggggacagagcaagactccgtctgaaaaaaaaaaaaaaaacagttttactgaattagtattattaaattgtttcttgtgaagcttgtacaaattctgtatttcctccagtaggggtttagtgcgtcagttttcctaggactggaactgctattgaacattgatgtgatgttgaatttttgctactttaataaaggaactgctgcgttggttttataaaatacatttctttaataattagcaaatatccttttcttatgttaatttaatagttataattttttgttggaaaagatctttttttgttttttaatttattttagagatggattttcactgtgtcagctaggctggagtacagtggcgctatcacagctcactgcagccttgaactcctgggctcaagtgattctcccacctcagcctcctgagtaactgggactacaggcttgtgccaccacccctggctaattttttttttttttttttttttttagagatgggctctcgctatgttgctcaggctggcctcaaactgctgggttcaagtaatcctcctgccttggcctcccaaagtgctgggaacacaggcatgagacaccatgccaagcctaaaatatcttttcatatccttcatctagtggagtattattcaattttaacatcttatttaataaacatgttatttcctagggctgctaaaacaaattattataaagcaacataaatgaatgcttaaagcaacataaatgaattctctcacactttgggacgtgtcagcagagttgtgctctgacagctccgggggtgcatccttcctcgcctcttccagcttccactggttgctaggaatccttgctgttcctgggtctacacacgcatcattccagtctctgcctctgtcttcacacagctttttcccatgtgtctctgagtccaaattcccctcctcttataaggacaccagtcagtttcgggtccaccctactccagtatgacccctcttaactggactacatctgcagggacccatttccaaataaggtcccattcacagagattgagactccagcttacctcgtagtgggggcactgttcagcccacaacaacacttaaaaagaaaatacaaacaggacgttctgacagagaagaagcaaaaacccacaccaattctcctctgggattgtatcactggcaggtgactggtacaattgcagaggagaatctttgtaggtttattaccatctgttatattaaggtgctgcagaaagccgtgtcctccaaatttttaactacttggattttaaaaacatgtacattggttgttaagatttcagaacactagttactaaacaccaactggaactacagaaaccctctctgagcttggtaagttaggaaggtgctctgggtttatttctcgccatggcactgcttagctacatgatgtagaacgatctgcttaattgatgtacctgtttttgttttaaaatctgtaacatgcaggccgggcgcggtggctcacgtctgtaatcccagcactttgggaggccaaggagggcggataacgaggtcaggagatctagaccatcctgcctaacatggtgaaaccctgtctctactaaaaaattcaaaacattagctggacgtggtggcgggcacctgtagtcccagctactcgggaggctgaggcaggagaatggtgtgaacccgggaggcggagcttggcagtgagccaaggtcgtgccactgcacgccagcctgggtgacagagtgagactccgtctcaaaaaaaaaaaaaaaaaagtctgtaacatgcaaagtatacccatctctaaggctcctgccaatgctaataacctaggactgcaaatgccataataagttaaatccattgtaggggtacacagttcttccatgttgtgtttataaatgcaagcctagtcgtttaggttaaagttcatttatattcaaatcattgtaatctgtgaacaccacggtgggttctggggaggtcaagagctctgatgcatgctgagatgctcaggaaatcagttcatagtttgttgccccagcagacagagaggatattttcaaaatataaaaggttcattgaagctggaagtggaactagtaattcatctatagagttttcattttcaaaaacctttataaacaagaaatttagtggaacctgggttaagcgattctggaaccccaaacacaagggtcacgtgcagaagcagagctgtttggatccaaattcagcctctccctacagagtcaaacgttcctcttcaaagctcagtctcatgtgtgcccctgctcttgtgcgtgtccttctgagacagctctcaagctttattaagcacacgggactgcaactaatgtggggattatttgtgaaactgcagcgtatttaagtcaaagagccaagaatgttagtattatataatgaagtgaacccatgaattctgggttttctaacttcattagtgatggacaccaggattcacttctttgatgaatgtctgccttgtttttaacattaaaaccagtaaagcttacctgtttcatataatcgtaaaggagaatattttaaaaattaagcctggctggccactgtggctcacgcctgtaacgccagcactttgggattacaggtgggcaaatcacctgaggtcaggagttcgagaccagcttggccaacaaggtgaaaccctgtctctactaaaaatacaaaaattagccaggcatggtagcgagcacctgtaatcccagctactcaggaggctgaggcaggagaattgcttgaacccgggaggcagaagttgcactgagcaagatcataccactgcactccagcttcggtggcagagtgagactctggctcaaaaaaaaaaaagaaaaagaaattaggttctacatggtggttcaagcctgtaattccaacagtttaggaggtcaaggtgggaggatcacttgggaccaggagttccagaccagcctgggcaacatagtgagacccagataattaattaattaaccctacagataattaattaattaacatactgagtgctctgaggaattctagtgaaggtcacttgttgacgttgggccttgctaatgcatttgaatcttctgccttttcctgcttccctcccacctgctgtgcctgacagggtcctacttactcctcaaagccttccttgactcctccagctgagctctaatccttctctctcctgtgatcccaaaaccttctgcatattcctctgttatagagcttatccagataacaatcactagggcagtccctgtgataacatgagtacttcatgagggaagggcacgagtcatgttcatccttgcagcccagcgcctgccacgcagggggtatggaatggttgttagttaagtaacaaatggggctacccataaacattgctgctttatagctagggagcctcccgtggctaagaaagatcgagagctatcattaagtgaacgttgttattttttctaattcatgcatcacttcaagggtaataatgtgctgtctcagagcaggctaaccattactttaggccagtctggtattctccttttcttcactgctgccatttaactgggcgtgcaaatggagtcaggtcttcatgttgctgtttactcacctcagtagggcctctcagatgaaccttgaagtagactgcacagtctactttttccttttttccagaaacaatccatcaagctttcaataattgtggtttacggtcctgatattagagcaatcttggacagtattaatcatttgtagggaaaggttttttttttttagcttttttatgctacaaataggacagaggggtcttatgtatccttctcccagtgcccccctcccccgccaatattaacatctgacataaccacagtgcactgattaaaaccaggatattaacatgcatacaaagactatctactagtctacaggccttattcagaatctgctgattttcccacttacatccttttgctggttcaggttacagtccaggatcccacattccagtcagttgtcaaactaaactgttttctccaaatgttatagttctttagtttttctttgtctttcatgaccttgacacttttgaacagcaccagcccatttctcccccctcagttttggattgtctgatgttttctcctgttagattgaggttatgcatttgggggcagaaatatcacagaacagatgctgcaccttcccagtgcatgggaagtgtttttccttgacttttttgtgtgtatattggagcttttctttaagaggtaattactactcttcaacaacttttttcctcctccccctttcctcttcctcatccttcttcctcttcctcttcctcttccttctttttcctcccttcttcttctcctcctttttctccttctccttctcctggcgttttatattctttttctttctcaggcatttggtaggtcactcaaaaagcttaggcatttggaatcataattcatgggccaggattcccttggaagagtgtttcccttcccctggggagcccgaggaaagactgggctggtcatcctcatgtcagtcagggccttctcctttcttgcagggctgaagcagctctccatccatgcctggcctctcactggttacaaactgcttcggaggttgggttcacacagaagctgaccctgagacaatggcttgagtccaagttgtttctttaggaggtgatcccaggaagcacctgccgggcagcaggcgagaggcaggaagggagggaaggctggtgcctcatcttcagtctccatccaccactgggtgagggtgctccccagggcattccttttctggcattttggcctggtccaaaccagagaaagcctgcagacaaggagtcagtgggcaggaagcaggaagtctagacggaagcccctggtgtttaaggcaactgcaagtgcccagaaatatgggagggaacctacgttgccccttccccctttctcattttacttctcccatttttccccaatattaaagtaaaaatcctaagtagtacctggagcagggttgcaaggggaaggcattagaatagaggttttgtgttgataaaaatccgcagctgctggcagtgctctcattcctatgttcttttatattttggataaattgatagttacttctatttttgcaaagatgagtgaccgaaagcagaaaagaaaaatgtgttttctaacttaaaaagttgctcctttccaagtagaagtctttttttcccaggctttccgactctgctgccagttatggagagagatgagtgacctgagctctgggggacgtcctgataccacccacagggaacccgaaacgtcctccaggggaaccacagaacatctaacagtgggggctgagcccttttcagaaactgtctggctacttgatgccatgtcttgctatagatagtcccagaggttctgagatgtgacctctaagactaggagaaaggacttacttggaggaacatgtgacactttctctctggccagatgaccttagccaagttattcttctaatgtcctcatctgcaaaatgggaaaaagaacacctatctcatgtggttgccctgaaaccacagggcatatgatgagaggtcacaggtgagaaaggccgcccagggttggccagaaacactcaaagcacgtagagtggggagaacagagagcctcccaccacacccccgactgtgaatgttcatgagctgaatgtgcactaactcagtggccccagtgggatctgcaaggtcattattgtgatcccacttctcagagcagaaactcagttcccaaagatgctaagcccctgcctcttgggatgtaactgtaggtgggcgagtcaggacttggatccagtctgtccaatgctgtgatccactctcccacatgcctcgtgtacgtcacaaacatcacaccaaagggcgagagcgggtactcatcttcccctgccccaccttcccacatcaagatggataatgaaagagcacttgtaaactcttttccatgcccaagagacaagatgagcgaatgaaactaacatcactcagcaccttctgtgttccaggaactaggccaggtgctacccaaaaagtttcctatttaagaagcgttggaggatggcaaaacccagctctccttcctggttgtcgcacagcgtacacaatgcacaagcactggcccagacaaactttgatcaggcaccgctgagcagctcttgggggctctttggtgcctgcaggttgctgccattgtgcccctcactcagctccgtccgggttgcagcacaccagccccgctgcagcagccaccgagagaggatcccacctttcagactttggccagcgtggcgtagttggtgttttcttgaccagggtcggaagaggcagagactagggttccaggttctggtggcagcctcgtgcagtacggtatgctgagcaaatccttgcaccctcctggccatccacctccttgcctttgtcttccagtttctgctcaaagctttccccttggcctaagatgctgcccactttccaataaatccttcattacttccaaatttggatgaatatttcattagacctatgatcaaatggagggtgaggacacagaggtcccttgggtagtgataaggtgggaggcaggtagaggaaagggacattgtgaatatagttagaatgagctggtacactatttctgaagtgggcaagtcaaaggagactgtcgtagccaccttcttttcaacttcctggcaatactgacatcactttgtaatttagatgctgggggtgtcagaaagagacagtgtgaaaggcacttgattaaaatgtgtaaatcctactgccctgaaagaatctgattttttacaacagccacaaaatactaagtagacagaggcaaaggtctaacttcatttttctattgaaggtattaattagggctgttactaacagtggtggcattgtgaaagagtcagaggattccagccaaacaggacttttcaggggctttgaacaaggtttaaagtatgtccctgcaggggaaaggaagctgtctgtagcatccctaccagcacgttcctctgattgttctcagttcatgtgagtccacagaggacataaaccgagtgagctggtaacagatgtaatgaaagtactccaggcctcagtaagaagagtcagaggggtggcattggtgcctgaataacagcatttgtgtagctagattagaacaaagcagggactggggaactcttcctgcaattctcaacttacagtttggggaatgaaggtattagtaactgaggtgaggctgaggcagtggaaacatagctcaggtggagagaattgtgcatgatcaataaatagagaacggctaattttcaaattggtgatgctgctaggagggcgtgaaggagactaagacaggaaaaacatccttgtggacagcattggccaagacttcacggcggagacagagcacagctggggcttggaggagagagagctctatgctgatggagggaaggagcctattccatatgtgagaaagaagggggacgagcactcccgaccaagtcaacaggcatagactgcgggggccaatctgtctgcagctgaatgtggtgaggagtggcagacacttggactgaacaggtagcacaaggtccctctctggagagctttggcagccaggaagaatttggatttgggaatctttgctgattaagcaggaggggaggatgatacacaggagaaatggtattttaggcagcacctatccactttctatttaggatagagggagtctcagtcaacagactttgagtatcttgatcccattggcaaagccagcctaattcatagatcagcttcagggactgaagccaattaaatcggggcactccagcttcactgacaaggctgttcccattgtgaaagggaggtcagactctgtaagccagatacagttagtcctccaatttcaactcctctccctgcggccaggccagatcaccgagtacccttgtgatcgttagctgcttccatgcaggcaggcctgcaagaaattcgttggctttcatttaaagataggaattggtaactaaaattgctagggcgatacataactaagtactctataatcttatctacatagataagaaataatacataaacctgtatgataattaacacagaggaaagtaggctataaataacctctaaaatgttcttttacagggcactaaggaaatggaaatgcacagcaatttaaaaaaaatgccaatacttctcttacttgtcacaggttagagatatgtgaatgccatgattatgttatacatttaattagtatatacctttgtgtctaaagcattttccatcgtggtcggctatgcttcctgcagtctcaaatgccctctacacactacggaatatcctatctcccagatggactgagatttctttaccaccgcatccgtccccgccccacccctcccccaccaattttgaacattttacaagctccagtcttttaaaaaatctcattcaggcatgatttttttttcctagaaaaactatgcctttcacttagaaataaagagaagaaaacatcttggcgagtcttgaaatatgtcaataaattcattgcccaataggcctctggatgagtttattattttccgctgcccataactccaagcatgcattggatggaagatgatatctgattgttcagataatttttttcttaccatcaagaatggaatgctttttccacttataattaaaattgtttcaagaagactactctgattaattggcctggtggtatgtgtgatgcatgtctcgtactttaggcagaacaggatgcagagaaggtggaaaggagatagaatgatgaccgtattgagtaactgggccatgacagtgagtgtagtctgctttgctaaatgtgagtttctgtaatttagcttgtaggtgactggtaaataggggcagagtgtcaccatcatgtgaaagttgtgctgattcatagcaatttctgccctacacgttaatgctggccaagcttgtctatccactctcttctgtgtgctcccttctccgttggaagtggtgattgctcggtgctctcaatctgggagcattttgcccttgtcttcatatctcagcagggtcaactctcaagctgttaagccccttccaggaagccacccacaccttttaaaaaaacttgtagtaaatatacagaacaaaacgtaccatcttaaccatgtttaagtctattaagtacatttatattgctgtgcaaccaacaccaccatccatctccagagctgaaactgaaaccctgtacccattaaacattaactccccgttccctccacacccctagcccctggcagacaccattctactttccttttctgagcttgaccgctctagatacctcatatcagtggaatcgtacgggattggtctttttgtgattggttcatttcatttagcgtaaggtcctcaaggttcatccatgttgtagcatgtgtctgaatctccttccttttaaggctaatattctattgtatgtatacaccacatttttttaatccattcatccaccactggacacctgggttgtttctgtcttttggcttttgtgaataatgctgccatgactatgttgcgtacaaatatctgttaaagatcctgctttcagttcttttccgcatacacccaggggtaaaattgttgaatcatatcatttcccatatttttaaaagacattcctgcacagcatttgcagttgtagttccttgctaggaatctaatgtgccttttcaactgcctatgtcttttgattacgatcgttactattgttagggctctggtgatgaagtcctcagggttcaaggggtctcagtcctactttcatgagccccgttgtcttttgtgcacaatttcacagaacacaaggcttttttgtttttttatttttttttcctgaaatgcatacatcccatcagagcagaaatggccatagggttggaataaataggctggggtataaccctgtgctgtattacctaattacctcagaaaaatgaaaccatctcagttttctgctccttaacactgcctcccagggtacctgcaggagtttctgacctgaagcatcaaacacaagcccttggtgtacacataaccagtgtgatacgttaggagtttaatatggttgaccagaggcttttagtcagagggagaacttggttgaagagttgagaatctctgcaaggaactggctcagtctttttcttatgcctacaactgttggcattgtacacaaggcttaatggaccaaacacatcagacaagtaaaacacctaaacaggagcattctgtcctagcaatgagtgtgtgtccagagagatctggaaagcttgaggaaggcagggaggggtagaacaagggaagtaaggacacaggagctgctgttcattctggtagagcggcttgtttattattcatggtttccatgagtgtttgtttataccaggaaatgctctcctatgcatgccacatgagagcagggctctgtgactcagggttggtgactgggcttggaggaatgtaggctccgtccacaaacaaaggagaatgaggatttgaatgtcacggtaaacttatttgtgactaaggaggtagtgggcaaaaggggggcaggaagaagccatggggcagatgaaagaggcgtcctgtctgccccctgcctgttgccatcacactgggtcgttttccacattgctgatcactgcagtgtgttccagtgatgggctttatctcattagtgagtcctgaaatgaatttagcaaatttccaccagaattaaatacaacaacccaagagagaagagagaacaccgaacacaccccatgaagtaaaggttggcatcgtttgtcattctctttatgttctcatatgtgagatcgtgggggtgaaatacgcatctcactgtgggctgtggtcggaagtttgaaaaacaccctggcattttgcctgtcttctgttcctggaccttccctttctgttggtgagaattttgtgtccaaatctggccaagggtggactctgaagagacaatccctggttgactctagtgttcattagaggagttctgctgccactttttcaggaatcagagatgccctgaggccacctaacactcctagatcttctgtcactgtggtgtagtgcagcgtcctgaatttggagctaaaagcttggatttgaatcactggaaatggctgatgggggcgggaaagctcccacccatgtggggaagaacccagagggagagcggcttgtacaaaggccctgcggggcggatagagctggagagctgcgggtcaggttgtcacaggccttgcatgacatgcaaagaaacttgaactcggttgtgtgggtgctgaggcctgacaggagttgggggtgtttcagaaagagctcttgggcagcaggaggtggttggggaggaacacagagatgggaaggcctgcatccaggggctgtcggggagggagagagctgctgtgccacagggtggctgtggggagggaagggagagtgtggggcatgggagagtcgggggactgtcccacagaaagctggtatctgcctgactggtggccaggtgtgcagcctggaggagacggagctgggcaatgctgagattcttaggtggactgatgggggacagtcacattagaacatggtgggccagaccctctgtcctgagacacattggctctacagtgcccgtctcccgtgctctcctcccacagcctccacttctccaaacaccctgggtttctccctgcccagcaccagtgcacccaccgcatgtcctcagtgctctcaagtggcatcactgctgcacagctcctgccagtcccctagagagcagcctgcagcctcagtggcatggcagtgcatctcagcactgggagttccaatcctatgagatgtcaccgactggcatgggtgccctctggggagacctggttcaggcaggacctcctttttaaggctgtttctaacttcccatccatcctgaattagtcagtgttctccagagaaataaaacctataggaagtatagagagataaatattgattgatttttttttttaaggaattgcacacaaatttgagggctggcaagtccaaaatttgtaagtaggccagtaggctggagactcaggtaaaagttgatgttgaagtcttgggtccagaatccacagggcaaggcaggccacagcaggctggggattcaggcaggcttttgtgttgcagtcttgaggccgaagtccttcttcctcagggaacccacatcttctctcctatgactgtcccctgattggacaaggcccacccacatggcagaggactctctcctttactcaagtctagtgacttagctgttagtatcacctaaaaataccttcacagccacacggagactgctgtttagatgtgtttgctgtctagatgctgtttgactgggcgccatggcccagccaaattgatgcataaagttaggcattacaaaacccccactaaagagttgacaagtccctgtctggggtctttgcatattttaatccattcctacaggaatcctgcgaagattcataatcctcataattttacagatgataacattgagattcacacagattaagaggcttgccccaaatcacacagttctggagacagaatccaggagatggccctcagacccagatgcttcctcccgcagtgctgagctatctgtgctgtgattgtgggcatgcgtccttcagcattcaggttacatcaggactttgaaagacaggcagatcttggtctgaatccttgctctgtcaaacacatggggctgaggacccggaaccatttgtttaactcctggctcagtttccccatttgtaaaatgaaaataatgataaactctccctggttttaatgatgaagtgaaatatgcaacacagtgcctggctgttagtaaccatgcactagacaataataatggctgtaatattgaatgtttcatcatttacaaccaacttatttgacagagaatgaaaatacccagttatatacatgaaagtcctgtctctgtcagggttttgtaataaacatttcaaattatgaatagatgtccattactggagttttttttccttttttttaagagtgttgggtctggaactcaactgtccaagttcaaacaccagctgtgggtacatcaccaacctaccagagagggctcagcttccttatctgtaaaatggtaatattagcagttcctaccatttagggttattgtgaggattaaatgagtaaaacatgtaaaatgcttagaacagaacctggcacatactaggtatttaatagactttaccatttttaccagctgcatagtctttaacagtactaagcagtatagatgcttgattaatttagctaacactagtgaattgatattgcccaggatgagggctgcaaagggagagaaaggcataaagctgtgaagatgtggttcagttctcagggaatgcctggttttctaaaggtggcagggccttccaggagcagcagacacaggcagagtgtgatacgtgaacacactgaacagtcttagtctgttcaggctgctgtaacaaaataccttagactcagtaatttatggacagcagatatttattttcccacagttttagaggctgggaagtccaagatcaaggcacctgtagattcagtgtctggtgaagacccttttgcatggataatgccttgtatgtgccctcactttgtgggaggggcacggggactccctctgccccttttataagggcactcctcccattcatgagggtggacacaagctttctgactctagcacaaggcacagccccaaacaaggcacaggccaggtgccatgggactcagtggttcctgctcaaggacatggccactttcctctgtgcctacttcacagctctgtctgacacccatcctgtcacattgtgtgtaacgacctcctcttccgcctctttgataagctccaccagggaggtcctccccagtgaggtcttgcacagcgggtgttctatgccagtgagggaataaaatcatgaaagcattccagccccacagctcccacatccccgtctgtgtgaccagtgctttcaatcacagcaaaatgatgcccatggccttttcaaagtcctgctgtggaagatgtctctctctgtcactcaccatcacccgttcttcaaatatgagctgctcattcatcaggcttgtgttggatggtcactctgagcaaggcgccagagacaaaatgcagagccactccaagtccttatcatggaggaattgacaggtcttgaagcagctttctctctctctctctttctcttcctctcctccctcaaatgttcagaactcaaatgatgattatttcttttctttctcacttttacattttacattgagactttcacctccgtgtaacctttaagtacacccaatacacagcgtagctgaatgtgacaaaggtcaacatgcaaaacaaaagcagtgttgtgcgtgtgtgtgagaaaaatgtctatgttacgtctgtgctcatgtctacttaggacctctgagttgggacttgggcatcctctgtggatggtgtctctttactctgattttatcatctgcatctccccatcataaacattacgtccacatacagacacattagctgcctggcaaaggagctgtcatgctggtctgtctcatgtatgtttagggtttccaataggccctggtggtcctggcacctctgatgtgggtgccccattttccacctgcagtcctgtctttgggctgtgtggcccacgtggctggccttcactctgtgcacttcctcctcactgccaccagcacactcttctcacactccatttcattgcctaaaaaggaacttgttcttgtcaggtagacaaggaataaataatagagctagggttctgctagtacatgacagagaagtgaagacattgacaatttaggactcagcatgtgtaaagtacacccttcagatgacaaaatcagtgaaggcagccaaggccactttcaacagaggacacgtggtagagagaatgatccacggtacgctgcaaggaaaactgtaggtctagggtaaaataatcacagatcccctacccatgtcaattgcaattccatttatctctgaagccatatgtatgaagagcacatactttatgtggatctacacaggagaacagagtctaaaagaggaggtcattttgaaatatccatggagattgatgaccactaaaaattactgggaagtgggctggtgaggtatagtgagagagtggagtttggaattcatcccttggggttggaatcctagcccagccacttctaacaatgtgactgagctgcttagtggaaataaatatccaccctttatcaaacaagtgttatcttatgaggacatttatgtatgttctcacctaatgttcacatcaactctgagcggtgggaactattgttatccctatttttatgattagaaaactgaggctaagacaataccaagttttagtgaaggtgggggaccatgtagaactctcttctaccacttgtgggagtgtaaactgatacaagcattttgaaaaaaaaagcttggccgtagctacagaaggtaaacatatgcacacctgatagtctggcagtaccactcctgggtaaatacccaacaagagtgtgattttttttccactaaaagcatgttcatgtcctggccacatagtaaccaaaagtaaaacaatctaattgtccatcaacaatagaataggacatagtatattcaaacagcagaatactacacagcaatgaaaaaaatgaacaagtgttacacagagcaacatggatgaatctcagacatactgttaaggaagtcagacacaaaagtatacatcctgcatgactccatttatatgaagttcaaaaacagaagtaatttatggcaataaacattaatgtttacctttggggtactgggcattgctaacgggggggaggggcacataagggagtcttttgaggcgctagaaattttcagtattttcatgttgtattagttttctatgatgtggaacaaagcaccacagtgtgttaaaaactatgcacatttattttcacacttttaagcgagtttccaggggtgaggagtctgggcacagcttagctggctcctcagctcagggcctcatgaggctgctgccacagttgggctgggctgtgttctcatagagaagcttgactgggggagaatttgctcccaagctcattcttagtgtcgacagaattcacttctttggagctgtgtgactgatagaccagttttgtttgtttgttttgagacggagttttgctcttgttgcccaggctggagtgcaatagcatgatcttggctcagtgcaaactccaactcccaggttcaagtgattctcatgcctcagcctcccttgtagctgggattacaggtgtgtgccaccatgcccagctggtttttgtgtttttactagagccagggtttcaccatgttggctaggctgggctcaaactcctgatccacctgcctcagcctcccaaagtgctgggattacaggcgtgagccaccttgcccggttggttattattatttctatattacagatgaagaaactaaggttccaagcagtttgcccaaagcacccagctagtgaaagatgaaagggggattctatgaaaggtctatgtgcctctgtggtgctccatccccagtgacagagatctgtcacggaagaactttagggcctactgtgtaatgatggagtccaagtgataaaccaaaaattgacagatgaagctatcaatcatgaaaatttaataaagaagacaggtttttcaggagttactcaattaaatcaaagagaatactgcttgtgaaggatggctctggtaaagtggtctgcatcagtgctagtccacacacactctcggtgcctagattcattatttaaagtgggactgatgggcagtgggatggagtggaagcttacagggctttcagaaccaagccagagtcagtgagtggcagagacagctctttactgcaaaatcccaatggctttctgcagattctggcctgcagattagaaaatgggacatttttaaaaactgtggtaaaatacacataagacttaccattttaacaattttaagtgtgcaattcagtacattaagtacattcatattgttatgcaaccgtcaccatcatccatccacagaacatttctcatcttgcaaaactgacattctgtccccattaagcagtaactccccactttcccactgcagcctctggcaatcaccattctactttctgtctgtgaatttgcctactccagatacctcatataagtgaaatcctacagtatctgtccttttgtgatgggcttatgcatttaatgtaatgtcctcagggtccacctgtgttgcagcgtgtgtcggaattttgttcctctttaaggctgagtgatattccattgtatgtatttactacatcttgtttattcatccatccattgatgaatacttgggttgctgtcaccttgtggctgtgtgaatactgctgctatgaaagtgggtgtacaaatatctgttcgagtccctgctttcagttcttttgggtatatcccagaagagggattgctggatgatacggtaattctagttttttgatttttgaggaattgccatacctgttgtccacagcaactgtgaggacagcgtgagaccgtttattctcctcttttgcctgtagctgccctgcccattcgtattcccccctccaaacccaggtgtgatgggggccctgtctccgagcagacagggaggcaccgtagatggcacactggatctggctcctggcccaccccatctgtactctagtcctttggccttgatgacccattcctggaggcaaaatgctttcctctctgtgcctcaattaattgggtttcccagcaccccaatagccaaatagatacttatgtgctaagataatgtgataaatgccaaacattattctgtcatcctaggaagcttcaaattagagagagatctgctctagtaaactgtagaataaaatatagcaaacgcaccttatccattctaatcaatgatagccaccagttattgagcatttgaccacgtgccaggcagtgagctgggactttacatacattattacacttaattttcaccataagatatcacagataaggagccggtcaaagtgaggttatgaagttttcctagaacccacatggacagagagcagaagaggctcaggttctctcctgctctcttgggtcttgccttatgtgccagaggcatctgtggttcaaccaacccccttttgtcccctgccaccttcacaaccaacaagatgctggaggctgctagatgaagataaaaatgtcagtgatattactgacaaaatcatctggagaatgagtgcacaattgttgctaatgatctctgagtgacctcccagctcctttgcctctgcttccctaacccggtctagaccttaagttacttcctccaggtgaaagtctggtctgtggcatccagacactgaccgcagatttctcccagccgtagtctgggcggaaaggttaaaaaagagtgaatactctgtgctgttaataaattaataaatcaggttattctatcaagggagtctaccaatggatttctccaaccagtcaggtaactcctttttcttttttttctttttaatatatttttttgagatggagtctcgctctgtcacccaggctggagtgcaggggcgcgatcgcggctcactgcaagctccgcctcccgggttcacgccattcttctgccttagcctccggagtagctgggactacaggcgcccgccaccacgcccggctaattttttttgtatttttagtagagacggggtttcaccgtgttagccaggatggtctcgatctcctgacctcgtgatctgcccgtcttggcctcccaaagtgctgggattacaggcgtgagccacgtgcccggctggtaactcctttttctgcagtagagggtggggcggaagccatacgggttactttataggagctcctcaaagaaaaaaaactgaaatgaggagaaaggagtttcctttctgccctgtacctcttgagaaacccctgctgaatggaactttcagcagatggaatacagcattgcttctccccaaccctgggggagctcacagcactgctttgttcagagcattttcaaacaggagcatgagatcaaatcctggctccactgctcaccagctgtgtgacctcagatgattcgttcaacccttctaacttcatttgccccatatataaaatgagaaggataactgtacctcaaggattgtcttgaggatttaagaaaatgatgaatgtaaacaacgtggcataagtgtccaacaaatattaagggaaagacacattctagttttggagatgttatgtggaacaacaacaaaaaaagcgcgttagacttagtgagaggtggtagtttctatccttagacactctcctgcagaaagcatcagtgttgttaggacgaacttgggtgaaagttttgaatattcaggctccagttagagtcttgagtaccaaaagatcagcagagaagaaaagaggtcaccgacctttggaggttcccacttgcaggaaacaacagaatgcagatgccggccttgtctgcgaggctgtgagtgatggcggccatgtggatagagagccatgttgacagaaagccactgcgggagacctaggcttttacacagaggccacattgtgattcccgcaggaatggtagaaatggaaggaaatttagctattgctcgtcctaatctctgacttaacagaatggaaaagcaagaataagcgtcggctggtgatgtactcccgtgatgaacacagctggttagagccaggttggactgcgccgcctcttcatgtcagatcagtgaattttctcttgagccatcctgccttcctctaatagatttgtaatctgaacccagacatatcttttatcccaggcgctcaaaaggttttcactgaaaccctgaaaaaaatattttttaaaactcacaaacaaacaatcagcaagcacctgtatgtgctaagttgatagatagtaagagtcttacatgggctaaagttttaattctccacccaatgcagagtgaggtcccactgtcaccggctcactgacgaggaagctgagattcagcaaggtccagcactcgcccagggcttgtacagggcctcaaggatgcgggggtcttcaggtctagttggtatcactccacagaaatccattcatctgagggccaggcctgtttcccaaggacatagtttcaaatatagtgctttcttcactataaaaagtattgcatgtaaatgttaatagtggtttccaagtaggcagaaataaccttttgaaacacaatttttttaaaagaaaaatcaaaatctgctcctcagatttgtgctaattctaaagagataataaaaaaaccctcaatttagaccgtgatatttttttttaaataatactaacatagatttcattttagcatttgtgagtgctttgtgcagattttttatagagtagaaataaaatggaacagtcaatgatattagcctcacatactatgtttctaaaattttccaaggtttggtttttatattttttcagctttaaaaatacatggtcattgttaaaacttggggtaatttcaataacaattcaaagaattaaataaaatttgcccatatttccaccacccacagataattatcattaatcttggagtgtgctttaattaatagactatttttagagcagttttaggtttagaaaacaggaatggaaagtacacggagttctgatgtactccctcacgcccctccctccacacacagctgcttgtactgacatcttacattcgagtggcacatgtgttatgattgatgggcccatgttgttacattaagatgaactaagtccattacttacaggaggctcacgccgcatgctgttcattctgtgagttttgagaaatgcataatgacatgaagccaccattataatgtcatacagagttttttcaatattttaaaaaacatacataaaattaattttcacttttcattgggtaatataatttttgttttttattttacagattgtgggtattgttctttgattataaaagacaatagacatttataaataatagtgctggccactaaatgaatcatctaaaaaactacactggtagaaagcatgcatttattttatgaattccattagctgcctatcagggaacatggagcactggggcacagatcccagcacagaagggtttgcttctcttctgtggttttcatgtcaattaatgattaggccttgagcctcacaagaaaggtgataggcctttgagtcggtttactgcaacagtctactcaagacttgccccaggccctgggaaacatgtaggtttaaaaatccctaccctgcgttttcctttcacagggagtgaacttctggcccaggcagtgggcagtggggcacggttgccccggagatgagactcctcttcccgccctggggggtgggggctggctggtggctgagggaactatttttgtttgtttctttttttaaaaaacggagtctggctgtgtcctccaggttggagtgcagtggcgcgatctcggcacactgcaacctccgcctctcgggttcaagtgattctcctgccttagcctcctgagtagctgggatcacaggcgcctgtcaccacgcccggttaatttttatttttattagagacggggtttcaccatgttggccaagctgctctcaaattcctgacctcaggtgatccgcccacctcggcctccaaaagtgctaggattacaggcaagagccactgcgcctggccggggaactgtttttgatgggtggggtccccggctgtggttggtagtgtgggggcgtggccgagggtgtggcctgagggagtgagctaaccgggggcgtggcctgatatggggcggggggaagagccgggctgggggcgtggcctggtggggagcggggctggggcgtggcttggctgagtgtgctgccgcggcgcgggaggagagtgtgcgttgcgctttctcccgcgatcgccctgccggtcgctagctccgagggcgcgcactggatcccaggctcctccgagagtgcggcgacctcggggctccgccggcaccggaggtggctctgagggcagggacgtgttggacacgctgactttgtaggctccgccaagaggcgccgcaggaggtaagacggcttcgggcgcgcggctctgccgggcgggcgcgggcatgggctgttaggtagaatatcgggaggatttgagtcccagtggactgcctcggggcttcgggatgtccagctcccagctgcttggcctctgcttcccccgccggtggaggctaccgggtgctcacctgttaggtccgtgcgcccgctccctgcccggcggtggctctgcgccctctgggccacccggcaccatcgcttttgggaggacatgcacgtggtgttctcgcaaaaggccgtttccagccggaagcctgcagggaggtcgccttgtaacttcacccgcgctcccagctcgcggggcctggcctacaggggcggccgtgggggtggcagagtctggggagcctggcgcggcggagccctgtaacgctctgctccatcgggtggcgtggctggtgcctccggggacccggagcgatgcggttggagagcttagtttagaaagcaagtttctcttggtaccagcggagtctcgtcccaggggaaagattttgggacccggtgcccatcgtctgtggactgcagggaatgcattggcggagttggtttggtcccattctgtgcaggaggtgggggaattggtactccagccccaggcaggtagaagcccgcgctgctgccagcgtcagggggagctcgggtgacttgggctgggccacccatctgactgcaaggttacagagcttgagcaaatttcccctccctccaagtgcaggaaaaccaaaccaaagcaagcaaacaaaaccctgtgggtcatttgcttcccagcattgcatagggatgtggataaatagaataatactgtgaatttattcagctcttgttcccatggcttcccatagccttatattatgcacctccccctgccagcattttctctgtccccaccttcggtttttgctgcctcgtgttttcttctctgtgaacctttcctggtcacccagcgatttgctctcctttattccccttgctaacaggcggagaaatctcactccttttctttttccacctttcccaacaaattctccttttttcctaatgtccccctcccccgtcttgcaaacttcctcactgcattattctcggggtgcctgtcatgcaccctccctgttctctgccctcctcccgcactttagagtttcatgtggctttgtcttattatcccatatcctaattctcatctacctcccttggcccccacgtttgccatctgcctccacccagttctcccatctccttccttatttgtgctcccgtgcatatgcaggtttcttccttgtttccccatgtttctcccacaggtgctttcttccctttgccctacttctccctggcaggcgctctgcccagccacagcctgccccgcctggagggcacaccttgcctcagtgccttctgctgcggttttccatgctccatcagcatccctgggttccttgtgttcttccagtccgccctctgtcaccttgcagacggctttctctccgaatgtctgcaagtgtcagaggcgaggagtggcagctgcatctctgcaggaggactctggatttcaggaccctcccttctgccactgcttctgactgattgttttcttattgaagtcgtatcctctacatagttctagaattaatgtcaatattgatgttaggtagcatctaccaaactctgggtgtgtgccaagcactgttctgagggcttaacgtgcatcagtactcatttaaaatcctccacacatccctataatgtaggatctactactgtccccatttgacagatgagaaaaggaaggctcagaggaggtaaccggcatggcttcttgccactgcctagcagtggaggccctcttctcaccagacagtggagcttccctgctgggtgacctcttgaactcaggcatgcctggagtttagctttggaaaggaggttgttatatgacatgttttatttagtctgcaatgtacaccagtggaggacatgaattctatacctgtaggacagtgcatggagaaaaacctaatgccggctgtccctcagaaagcctggggccagtgcctgggctgtcacctcatccatgctatcagtctactttccctcttagccacaggaagccctgaagaaagtggcataaaaatgacctggctgggcacagtggctcatgcctgtaatcccagcactttgggaggccgaggtaggaggattgcttgagcccaggagttcaagaccagcttaggcagcatagcaagaccccatctctaaaaaataaaaataagaaatcagctggttgtgatggcgcactcacctgtagtccaaggtgctcaggaggctgaggtgagaggatctcttgagcctgggaggttgagactgcagtgagctatgattttgccactacactgcagcctgggtgacagaacgagagactctgtctctaaaaaaattaagttaaattaaaaaagaagactactgccagctgtctcctcccgtgcattgagagttccgtttcactttagctggacagatctttatggtctctgttagctgtgtgactgtatgagtcttatttatatccatttcattatgtaatcttaaagccttgtccaaacatttcttttttagtctttatcttcctaagagttggaggcaagtagtatttctactttacagatactgaagcagagcatgcaccttgatagctgaaagggactttatattctacagatgaggaaaccgtggtccagggaaataaaatggcatattcaagggaaagcagcaggacaaagttggctctaaggcttctctggttcagggctcaatgcctggccctatagcttggtaggttgacctctctgtttgctgctggaagcaacaaagtttctttccccttcctttcccttgagctaagaggcattggaaggtttcacttagaaggggaactcatcagtgctttcctttcttttttgtctgaaaactaaacatttaagaaatgtttgcctatgagacatgtaatagcataaatgggatcataacatcacagtggtataaattcaaatgttttagaaagaactatcattgttatttctaaaacaccaggaatgaacaccaaatgtacatggttttcttgagggaaactatataatacatggcaatttgaaaatcagtacctggaatgtttaattgtattttacatttgtggagagaaatgcattggtacaaagtgcttacctgattttcctcatctttgcatcacaaatgaaagagcagtaaagggggagcatagagtaggttgctgtttttctgttggcctctgctgtacccacatccttctctggactcccactgagcccccttgctcctgcctctgctccctccatgtttaatgcctcttttggctccccagggaacctgcagggtattgttgaattgtgatgctcacctcctccataccagcctgtcttgacagaatgaaaccctgatgccctgaggcaggcatcctatgtgatggcttcatcactccctcctaggatgagatgggtgatcaggtaccatcctggggagaagggaggaagcatttgcgtgaggtatcctctgtgttctgtggtttaggtgaggatggttataactgaggagcaagtcaagtttcattgctccctaaatgagatggaggttcagggaagctgtcgtggccagagccccatagtaagtggcaagactgagactggaccccgggctgcctggcttaggagatccacctgcatccctcggtgtgtctgtcttccctctaacctgtaactccctgaggcagaaacggcaccacagaacctttcacaacatcgatagctcctgtgtgctgagctgaaggtgaagctggagaggagagaccaggggaccaggggacaagagcctgagggctcagaggagttcccagtccagccgtcgcgctaacttcggggttgtggacgatgccctctgtgcctgcaagaaccctggggagctgtggcaacaccgcagaatgcaaggagaatggcgtctgtgtttcctgtatatgtatgtggttgtggccatgtgctgtggtcaggatgtcagcttcggtggacacaggtaatggctgtcctgtggtcatcatgttccagcatctcggaaatggggctgttgcttcagtgaaccaggaccttaaaggacctgacttcttggtgagcaatcacttccacccatttccctgaagcgggactgccctagtctttgtggaatcacgagagcgcagacattgtcacttgagggattctgtgcctgcctcagactgtctcccaccccagcatgccaggtctgccctgaagacccaccagcatccatctgcaccctccaagaggactctacctgtccaatccaggagaggggaagggccagcctttcccctccacccccattcataccagagcaggctttgtttcttaacactggcaagctctccttagagagaagtagagcacaggtccgaaatggccagactggagagtttcaatggagggaggcaagctgccttcctgggttcctgggccacccagtctcctgccctcttctcctctctcagcccttcccggttgcaccccccacccaccccaactccaactttagcagcaggaaaggggacatctttactcactgtctgggacagatgcacggggagggcaggcttttattgtcttattccaatgggggcaggaggctggcaatgagatgtgttgtggtattgctgatcagaacgttgatcacatcttttgcagaaaatgttgctctgtgtgataggaacagtccattgtacttgagtgttaatgcgacaattcagtctcattacacaggattcttaggtcaggccctagctcttagtcaccatgggtgatgtagagattggtaaatgtgccctgagtcctaaacaacttgcacatgtacttttaaacacatccgggttgtgtgttgtgactctatagctaaaagaaaaatagcctctggttcagaaatgtgctccacttccacccttcctggggggtggagtgctcttctgtaacgtataaaagtctttctcattcatcaggaatggcctatttagggatttatgtggatttgcagattctgctatcacaagtgtaataccgatgatacttcatgctggtttgtaagcataaatgtatatgtaatacttactgtgtatcttttgtgtactagatgctgaagatggagagattgatcagagacagtcccattttcatgaagagactcatattcttgtctagagggagaggcccatatgtaaaagcaaagcagtgaaaagtagtgagtgtggcagtcagttaggggagaagatgagagttcaaagatccaggaaggcttcctggaggaggagctgagtccagtgtgggctgaatcctaacagaggagtgagcaattagggaaggagctgacaaaggaaaaccttctagccctgggggacggcgtaaacagaggtgaggagatgggctccagcttggtgacttgagggacccttgaacatctgtatcactatagccccaagcacatcagtcatgactgagtctgtgtgcctagggcatggttctagcatcagcaacacttgggggtttgttaggaaagtaaattctagggctcccaccagacctataaattagttctgtgagtggggcccagcaatctgttttttaacatgccttctacatgtttttcaaccacagaaatatttgaaagccactgttttagagcatatgcttcctggaggctctgaacagctactctccatgtctgcctcatagtatttgcagagaatggtaatcctcttttatgagggcattaatctccttcacgagaggggagccctcatgatttaatcagttccaaaaggacccacttcttcacatcatcaccttggggtttaaatttcaacatcaaaattttggagggacacatacattcagaccgtagcagttcccatctctcagagtttcaaaacctttgctgcatgtttgaattaccagggtgcctttaaatacattggtgcctactcttaccttcaaatgttatgattggtttggggtatgacctatgtgttgaaatttttgaaagcttcccaagcgtagtcaagtttgggaaccactgtcataggtgaggattccatgaattgatccttgtaaaatgccagagtgtcctggccatcacgcaggaagtgctttgtgtgtgtgtctctctggtggtggaggctgtgatggttctgtgataggaggaggtggtggtggcaccacgtctgttgtgtaatgaatgctcgttcagtgttgaacatgtgccagtttggacatggtcgtggtcctctcctttggtctgagagttgggaagtaaaacagctccagtgtggtggatctgcacagctaattctgtaagctaatcccaggcaaagatacagaagatgatgctgccaacagagaacacggggcccacaggccagcctccccagcaacctggcaccattttcctcacctctcaacagtacaagcttgaattctgaacagccaggttctaaaatcgtgaagtaccaatacttctgtgtgaatagtgtgaatgggaatgttatgtgaattgggtgccctaggattttgtaccttctccaaccaatcagttgtacccaagtgccagtttacacacacacacactcactcactcactccatctctagacttggccttctgtggcaagtgatctgtcttctagggtctaaatttcattgttataaaccatgtatttctaaacattattggaaagagtgtataatctttttgtatttcttgtcccatcatgaatattcattcttccttcattcattgttttattcattcagcaaatgttgagcaactgcatcggccctgacactgagctcacagttttatcccttttcctactgtggagacataaacatgtttctctctctgtcagcatggacaaagtagggtttttttggtcttaatttataatggtagccttctctatttctgcctcttgatgacgtaattattcaacttttaataatacaacatctgaaggacatttttcatgtcgacttcatgagccttctgtgaaccctgctgagattaattaaatcaaactccatgcagcaattatcctaaaatatcccgacaagttattaaaactgagtttacccaggactgtaagacttgagtaagtgacccatagccggtgcccttggaatgaagcctgggatccagtttaatttctgtcagtttctaatttcttttagtgcagaatcagtcctggtaaggtggttgaattaatgacatacatgaaaaatatgtgaattcatgtctcgagtttatgatttgctctctttctgtgaaaaagatagattatgtttttggttttgttttgccctgccagcttccaagtaaccacttactgttaaattggccccagtacacttcagtgtttgttgcaaatggaaagaattgattcactatatttttttctgctgctgaatcactaagcaaaactctaccgctggggaaacttttgtatcgcagcacacaagcagcccagtatgatggtaaagaccaacctccattgtgtggtcttaccattgtcactcgcgttacccacggactgaatagggtttagaaatacaggccttcaaaggaattgccgttgcttaaatgttccatggctgcttctgaaataacatccctccagccctcattcaaaacaagaaagaaggaagggcatatattaatatctgcaacttcagtgatattcaaaagtattatatatttaaataaggaaagttaaaatccattttaattttaaaaatttgaagttaaataattcaaaatatactaaaaaataaaaagcccacacagtattctttaaatggtatgttttaccatctaccagacctgctttctacctttgacttttcttttttgttgttttcttttcttcttttttagattttctatcagattcaatacattttacttttctaaaacaaatctaaaatccccagagtggcctgctaggctcggcttactaaagagcctgcttgtgttgccaagttaggattagcctggcattgggatctctgcgtgtccttgggccacgctgtcagaactttggtttcctgcccttcctagaaaaggcttgggctctttactcggtggttgcctgaattccagctcttggctgtggcctgtggttggaatgtgatggaacacgaatggtgtgcttgttataccaggctgatgtggagtgaggtgctaaccctggaaagctccccttgagttgagtcttagactcctggcctcactgtagattaaacagtgggattctgggtaagcaaaagtggcagcttcttccgaccattttattttttcatgacaagtcgtaaggcgtgagtagactggtttcaaaatcagtctgggttctatttgttgtatttctgactgctgtcctcactgaccggcattgagataaacagctcgaaagcagacaccttctccagactctgccctggaaatgagttgggacctgcagcctgtcctataacttcccttcccgaggtcatgtggctccgggagcatcaagatgggggtctggcacaggtgcccagtgtcgcttctcagcgggaactcaattctttcctcctcttctagtctctctcctctcactcaagctctctgcagaatgggaggtgagggaagaaggtaacctcctgcagacctttcttctcagtctagagtcttctgcttccagaggtttcaggtggctcagtgagtccccactctcctctcctgcctggctgctctgcctgcagactccactcggcattaggaaaaatactcagggcatgagcacttctgtgccatgaacacctgccttctgatacggagattgtcttggaggagaaagcaagaactctccctgctttttctcatccttattttaaatgtgacgtcttcatacaaagttcttatccctagagagttccaaaccagatagctttaggcagtacacagaagtgagaatggtttgacagtacaaggtcccatcttcagtttaccacattaggcctcaaatatctgcagggggataggtcaaatcatgctccagccactgcctcagtatgtctgatttggtagcatagttccttaaatttccacactagcatctctgaagtaacttgatcacattgacttcctgagggctacttttaagcctgctgtgattaatgaaatcaaaccccacacaacaattattctaaagcatagtggcttattcagtttcagtgcatgcccaactgctgggctggaatcgtccaaatggatgactacatttttgttgatgtcctaccataggagtctagtagccttttaaaatttttgtgggtggacactactcatctccttcagtttctctctcattctgggatgaggaatctctaaatgaagaaggaattgtctgtcgtcagcaagaggtgctactttctatttctaggctttcgtggaaagtctcctgtggaagcgccatcccctctgcagagtacatctctgttgtcctcagattgaggcttttgaagaacactctgtgtgaattggaacacctgtctcctgagatgaagataatgggtatctgtgccaatcagtctggcgtaaaaagatcattatgcaaagagactggtttagcaagaggattcctgggcccttgttccccagaactgggacagccaccctctctgggtgtactttcagatccactgaaagacctggaagcacccttttagtcattgagagacaatttacaaacaacagcaactccgaaaagtataggtttatatgattcgttgttgggaacagaagagtgttctttgatgggattgttttaaaagaactggaatgtccagtggccagttacacttgcatggttattctcttccctctgtaaactcatcagtgcgggattcagaaagaacaagcatggaacacattcctccatgccccttctttctgaatcctgcagtgatgagtttacagaaggaagacaatttgcatggaattttagttggaaatacattttcccattcgaaggaccctacaacatcaaacgagtgagacgttcaacagccgctgactgctcactagagctgggtggttttagatccccaggaaatggctgtcgtgccatctgagcatgaggcacttggaaagcagtgcccatcactgcctcatgtgttcagcgctgtcatttttcaagagacgaaggaagatggtgaagtcgtgacccttgtctcagaacatgcgggtcagatctgacaacacctgctgcttccatggggagggtggagtgaggagaactggtgctgggaatgctgatgccatcacacgtgtctcacgtatggtttcctgttgaatgacagtagccatgtcctacttctctcccacctacagtgtcctgcagatgacagtgggagtgccacaaggatgggtgaatggagcagcatacagggctgataattacaaatggcccaacaaggaggtggccacgtgtgcttgctggtgccccactgggtcagctgtgctgacttccacatgttcagacagacttctgcatttgtccttgtatcagtggtgaggtttggctattcaagaaaaagcctgtaagataattttgaacttgcagattaatggcatacccaaacctggtgattggttacgtgaataacaaagttttggtgcatagatgagtttcctcagctggaggaacgttgggaaagtcaacatctgacacagaagaggcagaactggttggcctaagaaaagcatagggatttgaaagttaaggcagtatataattgtatcagcaaatacctcaaaattcttatttatcagtgttttaaatttaacttttcatttttagatcattcggaggggttactcagattctccgaatgatgacatcttgcaagactgtactacaatggtggaactaaggatcttgacgtggatatggtcaagatgcagaactttcccatcaccacaggatccctcctgcttgtccatgcacactcactaaagccacacctagtttcctctgtcccaccctgcctttctccctgagagccactactttattctctatataattttatcctttcaaaaatattatgaaatcggaatgtttgggattggcttttttcactcagtgttattctccgatgatactaatactctttcagacatgtggtttgcaaatgttttctgaatcagtggcttggcttttcagccacttagcaaggtcttttgtagaatgagagtttttcattttgatgaggtccagtttatcagtttttcctttaatggatgatgcttttggtaccaagtctaagaactccgtcgtagtcctagatcctgaaggttttcttttgtgtttttttctaaaacgttcgtggtttttcattttacagttaagtccatgatccattcaagttaatttttgtagcaggcatgagatttaggtcagtgtttttttcttggcctgtagatgtctaattgctctagcactgtttgttgaaaaaacatccttcttgcattcagttggttttgcttctttatcaaaaattagttggttttatttgtgtggatctgcttctggcttatttactctgttcttttgatctatatgtctatacctcagccagtatcacagtcttgattatcacagctgcatacatcttgaaattggatagacctgattttaaaattgttttagctagctcccttccctttctgtattaatgttagaatagtcgtctctccatcaacataaaatcttgctgggatctgatagtgattttgggtagaattgacatctttactatgttaagtttctgatcagttaacacagtgtgtctcttcatttattttatcttttttgattagtttcatcagcattgtacggctttcagcacacaggtttcatacacattttgttagattaacacctaagtagttcattttttttgagtcattacaaagtggtattatgtaaatatatactttttgagacacagtcttgctccgtcatccaggctggagtgcagtggtgcgatcttggctcactgcaccctccgcctcccgggttcaagcgattctcctgcctcagcctcctgagtagctgggactataggcatgtgtcaccaggcgtggctaattttttgtatttttagtagagatggggttttgccatgttagccgggatagacaattgatttttaaaatgtttggcttgtatcctgcaaccttgtggaactcactcattagttcttagttgtgtgtgtgtgtgtgtgtgtgtgtgtgtgtgtgtgtgtggtagatttcttgagattttctatgtgggcaatcatgtcatgtacaaatggaatggctttatttctttctttcccatccatacgccttttattcccccccgtcccccaacttttttttttttttggccttattgcattggctatggcatcctgtccttcaccatgaagcataatgttagctttagggttttctatagatgttcattatcaagttgaggatattcccttctattcctgtctctctaaaaaggttttaaactgtgaagaatgggtgttgaatttcatcaaatgctttttctgtatcagttgatgtgattgtgtggtttttcttcttcagcctgttaatatgctggattacactgattaattttcaaatactgaatcagtcttggatccctggaataaacccaaatggaatgaagcccatttggtcgtatgaataattattttatatgtattgctgaattctgttttgttaagcatttttgtgttgtattcatgagtgatactggtttgtagttttctttttttgtactgttttgatcaggttttggtaccagggaaatatcaccttcataaaatgagtcaggaaatgttcctctttcatttcccggaagaggtagtgtagaattggtgttaattctttttaagcatttggtagaattctccagcaaaaccacctgggcataaagatttctcttttgagggttttgaaattacagattcactttccttaatggttaagggctgttgaagttatcttttcacattgtgtgagttgtggtagtttgtgtttttaaagaaagcggtccattttgttgaagttgtcaagttggtgtgtgtagagttgctcgtattatcagtcttttcaaagaacagctctttgtttaattgattttttctattgatatttgtttttaatttcttttatatctgctcttaccttaattctttctttcttctgcttgctttaggcttagtttgctttttttttctagatttttgaagtgggagattagattgatttgagatggttcttcttttcttatatgagcatttcgtgctatcagtttccctcacagcactgctttcgctatattccacacatttttatgtgttgcattttcattttcattcagttaaatatatgattaaaaatttccctttattttattttttattatcacttttttgagacgaagtcttgctctgtcacccagactggagtatagtggcgcaatcttggctcactgcaacctccgcctcccaggttcaagctattctcctgcctcagtctcccaagtagctgggactacaggtgtgtgtcaccacgcctggctaatatttgaatttttttagtagagacagggtttcaccatgttggccaggctggtcttgaattcctgacctcaggtgatccacctgccttggcctcccaaagtgctgggattacaggcgtgagcccctgcacccagcctaaaagtttccctttagagttcccccttgacttgtggattatttagaaatgcgttgtttcatatccagatgtttggagatttttttgttaactttctgttactgatttctagtttaattccattacggttagagaacacactctatatgatttcaattcttttaaatttgttgaggtttgtatggcccggggtattggtccatcttgatatatgttccctgggcactggaaaagaatgtgtattctgatgtcctagggcggagttctgtagctctctaatccttttggtcgagggcattaatcctgcagtggactgttttgctacagactcagtagtgatgcttgtttttttgttttttttaatttgtttttgttgttgttgttgttttgttttgtttctttggcagaaaaaaggaaagtgaagtttggatagcagataacttgaaatcatagtgcctagcaaacatagggaggctaaaagtctacattgccaatttagggcaactttgacaaggagagagaggagttagtgttctctattgataatttaggtaccaaagaggggccatttcatcgcaccattgttttagaattagaaactctgaagaaaacccagcttgatctcagaatcagagtccagacagctaaacttgccagttagggctagaagaaagggatgtgtttcagagttgtctatctagatttcttgttgagtaatgtttatgagtaactaccttaatgtttaccaagtatttatttaattaccagtttaattagacttagaacagggaaatggatcattactataaaagctaggttattcatctcttctaaacagtttgttgactacctcatctgttccagacatagtgctagtccctgaggatataaaaataaactagagagacacggatctaggtgtcatttttcttctcccacaggagagaaactttagaaatcccagtggcttctatgcagagcgattactagaaaacataaataaatttctccttgaagattattttagttgcaaataatgcagcttaaatttgaaaagcgatagttaaaatactctgcaggaaaactactgcatgttttatgacatgctaacagagtcaccttcaactcaaaacacagcatcctctgcgtgtctcctgtctgctgggtactggagcaggcgtgggggatctgagcttgctcagctcctggtgtatgcttctttcttaagtgtgattgttacaaaggtagagtccaagtgtaaatttctcaggctttatatccattttttgttttatttcttgagaaattgaagcctccatatacactgcaaaaagttacttatgcctgtcttttccataacacaattttataaggactatctacataagtcatgttgaacttaaacagatctggtgtcagtactaaagttgtttatgttttgtaaacaccccattagtttaacccattttatttaccagttacaactttggaagggcagcaaagaccttggtctattacttttcatgtaatctttacagaaaagttggaaaatacagccaaataaatcatagtatttgctctctttttccccatgatgtcacagtttccttttaatttctgcttttcagatcacaaaaacatgttattttcccagcaaactagatcctttgattaatgggaccaggcaagtccaaggacagattaagcacgctgggtcctggcaggaatcccagaaatgaccctcagtcagccttctttctctcaccttggacctgtttcattgaatttactgtgttttctgtgaaaatggagcttggtaatttctctaaagaagttcacatatctaaatgataatgaaatgattgattagctattaattattaatagatcacaagttcatgctgtagtatataatttttttttcttttgagatggtgtcttgctgtgtcacccaggctcactgcaacctccgcctcctgggttcaagggcttcttgtgcctcagctttctgagtagctgggaccacagacgtgtgccaccacgcgcagcttatttttgtatttttagtggagacagggtttcgtcatgttggccaggctaagtctcaaactcctgacctcaggtaatccaccagccttggcctcccaaagtgctgggattacaggcacgagctgccgcacccagcctgtagtatatacttttgttagtgagcctcctttctctctagtacaaaaaggagttgaaaattaccttgtcaattctgtttcttaattattccttaattaatcaaagaatagtggacacaaacgttgctttacttctctgactcagttacttttaacaattaagaaatttttaatagatatgtgaaaaaaagagatcagatactttcataataatttaggcatatgtcagtgtgtctggctgtgcctggccagaaattataaatttatttcttacagctctggaggctaggaagcctaagacagaggtgccagcaaattcactgtcggcgtgaatgcctgctttctggtttataaatggtgccttcttactgtgtcttcatatggtgaagggggcaagggtgtctctcttaggcctttttaatttaatttttatttttttagacacagtcttactctgcaatcgtagttcactggagcctcaaactcctgggctcaagtgattctcctgcctcagcctccccagtagctgggactacagttgcatgccaccatgcctagctaattttttaaattttctgtagagacagggtctcctgtgttgcccaggctggtcttgaacttaagtgatccttccaccttggcctcccaaagtgttggggttacaggcatgagcctggccattgggcctttttaataagggctctaatcccattcaggagggctctgccaccatgatctaatcaccttctaaaggccctatctttcaatataatcactttggggataggatttcaacatatgaatttttttttaattgggcctcactttgtcacccaggctggagtatggtggtacaatcatggctcactgctgcatcaaattcctgggcccaagagatcctcctgcctcagcctcccaagtagctgggactatgggtgtgcgccactatgcctggcaaatttcgttttttgtagagatggggtcttatcatcttgcccatgctggtcttgaactcctagattccaatgatcctcccaccttggcctcccaaagtgctgggattacagatgtgaaccaccatacccggcttgattgttttttaaactgggaatatctgcaccagatcaacataaaaatttccagaaggcgcaaacgttccaataataacagctcctaccattcactccagaagccactgcttgccacctctgccacctgtgagcatgctcttgaaaaatacttgtggaattagcagaaatgtattgaactgcattatgatacggctgcaaggaatgagtagacatcattttgatacttctgaggaacatgcatttttttttaactgtaagagcttttttgaccattatcttatgacatcacttgtatacagttattaatagtactaattgcttcttggccttttggctatgatcaagtatagttatttacagtagtagtaataagtaccctaataaatgagcttactctgtgccatgcattgctaggaaggtattattatctgtataagaacaaatagaggatcaaaaaacttagtgaaccaagtagacccagtctatctaatggctgagctgggattatacccagcattttgtactgtgccatttctgcctgttaccaccttctgtctaggttaaaaattgacaccacagcacagcaactggcctctttgtttcttttttttaacagctttattgagatctaattgatatgtaacgcatccatttaaagtatataattcagttgtttttagtgtatccacggagtcatgcactcatcaattaccatagtcaatttgaagacattttcatcccctccgaaaggaaaccctggacccattagcagtcctcattttccctcaagtccccagccctagacaaccactcatctatagtctgtccctctacatttgactattctagacatttcaataaatgattcatacaacatgtggccttttaggtctggcttctttcacagcttaatgtttcaaggttgatccctgtggtagcatgaatcagtatttcctttcttttcattgctgaatgatacttcattgtatgtatgtacctcattgtatgtattcattcatcagttgatggacatttgggttgtttgtactttttagctgttaggaataatatgctatgaacatttgtgtacaagtttttatgtggacatctgttttcatttctcttgggcatatacctatgcgtggcattgctgagtcaaatggtaactcagtgttgaaattttggaagaattgccagactatttctcaagcaggcatgcaccattttacatttccatcagctatgtatgggggctccagtttttaaactgatgtgtgctatttaaaaatttaaaaattgtggtaaaatgtataaaacataaactttaccattttaaccagtttcagtgtacagttcagccatagtaagtacattcattgttatgcaaccaatctccagaatctttttatcttgcaaaactgaaactctgtacagattaaatgcaagtccctatttatcccactcccagcccctggcaacctctattttactttctgtttccgtgtcaccaacactttttcccatctgctttattgattctagccagcttaactaatgtgtctgaagtggcatcttatttggatttgagttgcatttctctgatgcatgatgatgttgaacaccttttcatgtgcttattggctatttggatatcttcaaagaaatgcctcttcaagtctttgctcattttttaattgggttgcttgccattttgttgttgagttgtaagggttttttatatatcctggatagcagactcctatcagatatgtaatttacaagtatcttccattctacagcttttctttttactttcttacttagtggtgttctttgcattaaagttttaaattttgatgaaatcatttagctatttgttttttggttggctgtgctcatagtgttgtatttgagaaactattgcctaatccaaggccgtgaagattttctccctatttttgtctaagagttttatagtttcagctcttagatttaggcctgtgctctattttgcatatggtgtaagggaagatctcatttcattcttttgcatgtagaaatgcatttgtcccagtgtcatttgttgaaaggatgattctttcaccattgaatggtcttagtattcttgttgaaaatgaattgagcatgactataaaattttatttctgaacctttagttctattttcattgatctatatgtctatccttgtgctagtaccacactgtcttgattcctgtggctttatagtaagctttgaaattaggaagtctaaaatctcaaaatttgttttcttttcaagattgtttaggctattctgattcccttgaattttcttattaattataggatcagcttgcaaatcatgcaaagtcgtcagccaggattttgataggattgtactgaatctgtagctgaatttgggatgcattgccattttaacaataccaagtctctccaatttatgaatccatttactgaggtcttaaatatctttcaaaaatgttttctagcttacagagtatatgttttatacttctcctgttaaatttaggcctaaatattttgttctttctgatgctattatagatgggatagttttcataatttttttttgattattgattgcaagtctatagacatgtgatggatttttttttctatgcagccatgcatcacttaatgacagggatacgttctgataaatgcattgctaggcaatttcatctctgtgcgaacattgtcagagtgtacttacacaaagctagatggtacagcctacaacacacccaggctctctagtgtagcctgttgcttctaggctacaatcctatacagcatgtgactgtactgaatactgtaggcagctgtaacacaatggtaagtgtttctgtgtctaaacatggaaaaggtacagaaaaatacggtataaaagttttttttttaaatgacttgtctatgtagggcacttatgaatggagtttccaggactggaagttgctctgggtgagtcagtgagtgaggaatgaatgcgaaggcctaggacattgctgttcgctgctctaaactttagaaatactgtccacttagtccactctaaatgtatttaatatatgtgctgctgaagcaagcactctaaatttattgaaacttttttcataataaattgaccttagttactataagcttgttactttataaattttaatttttaaaatcttttactgttttgtgataacacctagcttaaaacacaaatatattatacagctgtacaaatataatttctttatagccttattcttctctactgtccctattccataatcttttttttattaaaatttgttttgcacttcttaagcttttttgttttgtactttttaagcttttttgttaaaaatgaagacagaaacgtacacattagcctaggtctacatagggtcagcatcatccatatcactgtctaccacctccatccacatcttgtcccactagaaggtcttcaggggaagtaacacgcatagagctgtcatctgctataataataacgccttcttctggactctgtcctgaaggacctgcctgaggctgttttacagttgactttttttttttttgttaaagtaagtaagtagaaagcatacactttacatgaactataaaaagtatagtataggccgggtgtggtggcttacacctataatcccagcactttgggaggccaagacgggtggatcacctgaggtcaggagttcgagaccagcctggtcaacatggtgaaaccccatctctactaaaaatacaaaaattagccggatgtggtggcactctcctaaaatcccagcacctcatatagtgtctgacatgtaataaatgtttgaataaaaagttgtgttggaattattaaactacttgtggaaaactcttgtttggggtatttgttttggttttgttttcctctttaggaaggatccttgcatggggaaagaggcctggccagatgagataaaaatctgtttccagttaggctgaggcttagaagcaggaaaggtcctttccaccagcctcagtttatggatgggattagcagtgttgtaacactaaactttgaggcatgtatgactgtgtttgtcttttttgttttgctataaaggaatacctgagcctgggtcatttataaagaaaagaggttaaattggctcacggttctgcaggctgtacaggaaacatagtgccagtatctgcctccagtgaggcctcaggaagcttccagtcacagtgggaggtgaaggggaagtaggtgtgtcacatgatgagagaggaagtgagagagagacagagagagagagagagcgcaggaaagaggatgggccctttaaacagccagctcgaagtgaacttacagagtgagaacacacccattaccctggtgagggcaccaggccagtcctgaaggagccatccccatgacccaaacacctcccccaggccccgcttcaacactggggatcacatttcaatgtgagatttggagaggacaaacatctagaccatatcaatggctgtcttttttgaagacatttcctttaattttttaaaactgtcatttctagtaattttgttctgctggggttaaatatatttggctgtgcagattttatcagtgttagaaaaactcagcatgttgcgccacatcagtcgggccaggtaaacaaagctagtccattacaccaaacccaaagaaggcaaaggcagctcaccgagggctcacagcagggccttggtgcccagggtggcttagtgcattcaggggcaccattgtttttatcagtacacttggaatcagggcttctgaggatatctgcttacatatattcctcattcacataacttgccagaaaagatatagagagattgctgcatacctggatgacttcaaggtagtaaagctataacttttgaggggttataatttccaacacactctctcactgagtctaaactttttcatctaattttcttttgtttgcatgttgaggtgcatttggcagagggctgaatttttcacatataaaaacatatatgaaacatttttcaatacaagtcaaatataataaacacacattttcttgaggatagacatcatcctttatcacttccctctgtaaaaccaccatcaaacccaaccaagactgaatgacagaactagaaacatttaacaacggcatcatcatgccttaagcttagtacacaaaatagcgttgtgtttaagggttgaaacgctttctatgttgtaagttttccaagaggtacaagtcaaggctttcactactttatacaagcttgtccagcccacggctcacgggccacatgcagcccaagatggctttgaatggggcccaacacaaattcgtaaactttctcaaaacattatgagatttctttacattttttttttttttttagctcagcagctatcattagtgttagtgtattttatgcgtggcccaagacaattcttcttcttccagagtggcccagggaagccaaaagattggacacccctgctttataatgttctctatgggctaatggtggccgtacctgtcagcactcctggggtgagaagggggcggggtgagcaggactcttctctgtgctgggagtagaggcttagaggcactcactctcatcctggttttgctccatgtgacttttaaaataatcacgggcgcttcctcagacacagcgtcacatggtgttttccatgtattgggtcacttcccacacacagcacattgagcagacattactcccccctctacccaggagaaaactgaaacacacaggaagtggcgcgctcaaggtcacccagaaaagccagctgccttcacaggacagtcttgagaagtgtggaggagagcgccaagggacagtaacagagctatgagggcttccttacctgtggcatctgttgacgactgtgtctgaataagttttgagtgaatgggtacctggtgctggcgcttgctgagaatgacttattttggaaggtcagtgttaaaatcatttggatgtggaaattccatacagaaaattctctgggaaaaatgtttggttttgccctgaacccaaggagccagattactttccttattgtacccaataattacttacttattgtacccaaaactgctgagctcaacagaacctgcacctgctgtgcgggtcccagctgggccaagcagccaccagcccagaaccatttggtcaccagcagataccctcatttggatggaaagtgaagagaaaagcgtacaatggagccaaccaaatcacaaagattatcacttttttggtggtagtgttgccagttttgatttttctagagtgtctgtttaacttgttgattttttttctctctgatgtgtaattgttgttatccattaacttaatgctgggcaacagcatgaactcactaatcacagtgaggagttttgttttctgtgcaggacaaagttcaacgctctgctaatttcatgatctcagttgtgaaggtccaagtgactggacctaatataaaatcgtgtccaccatggtatgacctctctggtgacattatgaagacttgaaaaggcaggatgggtccagattttttttttaataaaatacttctttagttattttgatgaaaggcagtgtaaaaggaaaatccattgttttcctgttgttctgagttgagtcaagcgacggagtctacggaaaatgaccacttctttactcttccagagtcctagcagccgtatgggtcattcctcaggaaagtgcgggtgcctttgaaagtgggcactggggccgtctttgaaaggcacgtgtatcgagcattgtgttttgcttctccaggggacctgctctgtcactgcatttgttgccagttcgggcatttcccccgctttctgtagctccttgtgtgccacctttcctaatcataagccctgaagttcccctgtgacgtatttttgtgctgctgagtagatgctagtttgttacaaaagaccatacaataaatgcttttgtgtgtaatagtgcccatcacacatgataggcactcagtgaagttttactgcttgctttataaagaaattttttccacaagggattttatttcttagtgaagtactgccatgaggatgatttttagggccctataatttagattttcctgattcaagactgtaatttattcttaagctatctggagatccacttaatgagaaataaaccttttaagagggctgaaagaaccaagattttaaatggccaaattaaggcttttatatcacctctggaaataactactcgtttaattttaaatccattaatagccttctgtaattttgacataatgactattgataagtcctttatatggtctcatttcagaaatcttaaggaaataattggtgttaacgtaataggcatcgtgttttaaacatcatatgaaacatcataattgaaggtttctcaattcctggatttaacttagaacacatacaaatagatgcagtttttttttttcatgagccctgtgttagtcagggttctccagagaaagaactaaaagaatgtgtgtgtgtgcgcacacacatacatcaagagacagagagagagagagagattaaggaattggctcatgtgattgtgaagcctggcaagttcaaaataagcagggtaggtcagtaggctggagtgtctggcaggcgttgatgttttaggcttgaatcttatggcaatcttaaggccaaatttctttcttttctggagacttcagtcttttaaggccttcaactgattagaggaggcccatccacatcatctgcctcactcaaaatctactgatttaactgtcaatcacatctagaaaagatcttcacagcaacatccagactggtgtttggccaaataactgggcatcacagtcctagccacgctgacacataagatgaaccatcacaactaccagtgaggaaacgggaatgttacggttcacaggggaacctaaagaagaagtcctctttgcttcacctgcttacatgatgtagggttaattgcaaagcaaaagtagaaaattagaaggtttgggaatagctacaggaaaattggatgctacaccagcaattagggattaatagtatgactaaggtcagaggtttacgatatgtcagggatacacaaactcacgtgttgtatgtttgctggcgactgataatagtcttcaaaccaagagggaacatcagccatagtccagaaaaactgatgacagagtttcctaaatcccagaaacgaataaaaataggacatcaacaatgttctacgagtcaagattaaagctgaaattattttaggttgtccccagggtctaagtaatgccactgtgctaggcccaagagctaaagagaagttagttccctttcagagtttcttaaccttcagtgtcaggaggccaaagcaaagcataacattgttacgggaacattaattttctgcacagaaaatacaggtttgagagggaagtgctccacagggcaacttgtttgaaatgggcaacaacgctattgaggcggttgatcaagttgaagagaaaagggaaggaagagctggaaataggattggaaatcctagtgtgtttggcttttgcatattctcatgaaattccaattggtgaatttattaagaagttgatttcatttctgtaaagtcacacttaacatgctgtttagttaaaaagagcctcattatgggtcagatgtgtaggtgttgatttatgcaaactgagaagaaccaacaaagagacttctcttaatccttttccttgaggaggatgttccagcaaacaccaggttgcatgttatgacagcctagcacaaaactacctttttcaaagcaatgtcgtctgttttcagatgctctactctcactgcttgtataattctaggaatttcagaacccatgaattttggctaccaaaattctttagctatccaaagaaaggagaaagaaatagtcacagcaagatctgcttttctgttgcagtcatccctgcctcagagtgacacatgagtcatgactggaggtagatgaagaaactacgcttctggttgtctggcctcttttctgagtagtcctagctatcttcagttctcagtggctttgttaacacacaatcattgccctctttctctccacccttctatttatagaagtttgacagggatgtggaaaacagcgaccggcttacgttttattctgcctagctttattgcattttgcggaaattgcaccttttacaaactgagggtttgtggcaaccctgtgtggagcaagtctattggcgccattcattgttacaatagcatgtgcgtacatcttgtctgttactttttgataattctcaaaacatttcaagcatttaaattattatatctgttatggtaatctatgatcagagatctttgatgttactattgtaattgttttgggcttcatgaactacacctatataagatggtaaacttgatcaataaatgttgtatatgttttgactgcttcactgctggccactcccagtctctctgcctcttctcaggccttcttatttcctgagacagaacaatattgaaagtaggccaattaataactctacaataacctctaagtgttcaagtgaaaggaagagtcgcccatctctattttaaatccaaagctaggaatgattaagcttagtgaggaaggcatgttgaaagccaagataggctcaaagcttggcctcttgtgccacatggttagctaagtcatgaatgcaaaggaaaagttcttgaaggaaattaaaagtgatactccaggccaggcgtggtggctcatgcctgtaaccctagctctttgggaggccaaggcgggcagattgcctgagctcaggagttcgagaccagcctgggcaacatggtgaaaccccatctctactgaaatacaaaaaattagctgggcgtggcaacatgcacctgtagtcccagctactcgggaggctgaggcaggagaatcagttgaacctgggaggcagtgagtcgagatcatgtcactgcactccagcctgggcaacagagcgagactccatctccaaaaaaaataataaaaaaaaaaagtgatactccagtgaacacacaaatattaagaaagtgaaacagccttatcgctgatattgagaaagttttagtggtccagatagagatcaaactggccataatatttccttaagccaaaggctaatccaaagtctaatccaaagcaagtctctaactctctttaattctgtgaagactgagagaggtgaagaaaggtttgaagctagtagatgcgggttcttgaggtttaaggaaagaagccatctctgtaacataagtgcagggtgaagcagcaagtgctgatgtagaagctgaagcaagttcttcagaagatctagctaagataattgatgaagatgatgacaccaaacaacagattttcagtgtagacaaaacagccttctagaggaagaagatgccattctaggatttttctagctagagaggagaagtcagtgtctggtttcagagcttcaaaggacacaatgattctccggttaggggctaatgcagctggtgacttaaagcatgtgctcatttaccattctgaaaatcctaggcctgtagaattatgctaaatctactctgcctgtgttccataaatggaacaaagcctagatgacagtacatctggatatttttagcccactgttgagacctactgtttagaaaaaggattctttttgaaatattactgctcattgacaatgtgccagtcacccaagagctctaatggagaagtacaacgagatgaatattgttttcctgcctgctaatacagcatccattttgcagcccatggatcaaggagtaattttgactctgatgtcttatcatttaagaaatatatttcaggccaggcgtggtggctcatgcctgtaatcccagcactttgggaggccgaggccggtggatcacgacgtcaggagatggagaccatcctggctaacacagtgaaaccccgtctctactagaaatactaaaagttagccaggcatggtggcgggtgcctataatagtgccagcaactctggaggctgaggcaggagaatggcatgaacccagggggcggagcttgcagtgagctgagatcacgccactgcactccagcctgggtgacagagcgagactccatctctctctctctctatatatatacgtgtatatatatatataatatatttaatattgcatacatatttatatttaaatatatagtatatttaatattacatacatactatgtatgtaatacaaatataaatataaaattatatttaatttattatataaatatatatatttatatatatattatatattatatatttatatattatatatatttatatataatatataatatattatatataaaagcatatataatatataatatattatatataaaagcatatataatatataatatattataaatatatttataatataataaatatatatttatataatatattataaatatatataaaatgatatttaatatattatattaatatatcatatataatataattatatatcataatatatattatataattatattacataatatatattatataattatataatatattacataatatattatataattataaaatatatattatataaataattatataacatataataatatattattatataacataatgatatacaatatatattattatataacatataatgatatactatatatattattatataacatataatgatatacaatatatattattatataacataataatatacaatatatattattatataacatatatataatatatattattatataacatatcatatataatatatattattatataacatatcatatataatatatattattatataacatatcatatataatatacataatatatattattatatataatatataatattatatattattatatataatatataatattatatattattatatataatatataatattatatattattatatataatatataatattatatatataataaggctgtagttaccatggatggtgattcctctgatggatctgggcaaagtaaagtgaaaaccttctggaactgattcaccattctagatgccataaagaacaggaggaggtaaaaataccacccttaacaggaatttggaagaagtggattccacccctcatggatgactttgaggggttcgagacttcagtggaggatgtaactgcagatgtggtggaaacagcaagagaactggaattagaagtggaggctgaagatttgatggaagtgctgcaatctcatgataaaaatggaatgaggagttgcttcttgtggaggagcaaagagagtggtttcttgtgacggaaactacctctggtgaagatgctgtgaacacggttgaaatgacaacaaaggatttagaatattacataaatttaattgataaagcagtagcaggatttcagaggaaagattccagttttgaaggttctgctgtgggtaaaatgctatcaaacagtatcgcatcctgtagagaaatcctatatgaaggaagagtcaacaaatgcagcaaacctcactgtcttctcattttaagaaattgccactgcagccttcagtaaccaccacccagatcagtcagcagccactaccattgaggcaagaccctccaccagaaaaaagattaggacttgctgaatgcttggatgattgttaacattttttaacaatgaagtctttttaaatttattaattaaattaattaattattattttatgtttgtagagacagcatctctcgatattgcctaggctggtctcgatcacctggcctcaaacaatcctcctgcctcggcctcccaaaatgttgggattatagacatgagccatcttgcccagccatattttaaaattaatgtatgtacatttttttcaaacataatgctattacacacatggtagactacagtataatgtacacataacttttacatgcattgggaaaccaaaaactttgtgtgacctgctttatttcgatatttgttttattgctgtggtctggaaccaaacctgcaatatctcccaaggcatggctgtatctcctctttctcactatacattgctttcttttttttttttttttttttttttttgagatggagtcttgctctgtcactcaggctggagtgcagtggcgtgatcttggctcactgcaagctctgccacctgggttcacgccattctcctgcctcagcctcccgagtagctgggactacaggcgcccgccaccacaccctgctaatttttttgtatttttagtagagacagggtttcactgtgttagccaggatggtcttgatctcctgaccttgtgatccgcccgcctcagtctcccaaagtgctgggattacaggcgtgagccactgcgaccagctacattgctttctaaagcccttgcatctcctgcatacctcatcagagtaatgaaaatgttgcagaattttgctccttagttcagctaaaaccgggttcttgtcacacaagcaggaaaatttaggcctgcgtacacattgaagggtgaacagtgcaggattattacagggcgaaaagggaacaaaaaagaaaaatacacggcaaagtgagatggagtcctgctaacaagcccccacctcacccaggccaccacacaggagctgaagaggtcaggcttctaccccgatctgtggctccaccctggttcccccagtccattgtggccatgctcagacaaggccctgggcaggttgcctcatagggggcacaaaagcagcgttgtaaactcttgttgggcaggcaaggagattcaccagggacccccctccccccacaccttatctgcctaagcatttggctatctcaaaagcacattctaagttaaacaatgacctgttaatttccaattcaggggctttttcctgtagttctctgcttgtgttttgaggtgttcgtctcctcctccttgcagctctgcttggtgactgtgatgcctgctactctagttctcctcctgccccttcagtctctgtgccagttcctcttcctcctcctacccgctgaaacagcgtcttcctcagaatactgtttccagcagttcccatggcctcacctatcacctcatctgcactcactccagacatcttgagagtcaagacctgaagtcctgtctgttagtacatatttaatgtggtaggcacttgagtattgaatgaaaactcaggcaccttcctctcactaggtctgcacacctgccctggccccagagcacacagataggcttacccgcttctacggtgtgattgggtcaggctgttggagaagcagagagaagatttgttgtggaaggggtgccatggagacagatcttgaagatctcaaggattttgagagggtgacatgggaaaaaaaggccttctgcatgggtggaactgcctaaaactaggttaggcaacaggaggcacttccagagcccagcaggtggtcctgggagcactggtagagatggacaggaggaaaaggattctttcctccccctgctgttctcaaaacaccaagcactgtaaccggcacattataagtgctctttaaggttttgagagaagttgaaagtcaaggtgtgtgggctgagagccctggggggccaggctgaggagcttgacacataatccaggaagggacaggagccactgagcattgttgaggagggcagtgactgactggggaggaccttcaggaagctttgtctggcatgtgggcgctggatggataggagagtagaaaagtggacaagtgagtacactgagggggaagtgacggagctctgaggaaggggagttgcaggggaaatggacaggagggaatgactccagtgagctgggggcacaagggaaagtaggtgagggtgggggagagagatgacaaaggccagtgttggaggaactgggagaacggaggcattgttgacacaggcggtggccatgttgtttgtactgggggcctggtgagcagatgcctcagcgtggttgaatctgagtgtgaggagtgaggcctgcggggggtgctccccagttggtgccaggatagcttcacctggagccgagaatgggtgatgtggtggtcgctcaggcacatggagttgctggagaaaccagttgagtctggaaccttgggaaggggcaggaacaggaggaaggatggagaaggggcactcaggtgggaggaagcctggagaggaatcagtggcatcagaggcactggattctctgaaaagagtcccttcgatttggcacttagctatgctttagcaaatatcagaggagcaggtcttcttctggaggaagaagtagggttagtgtggaaacgtagctattcctcagtgagcaattgttggctgaatcctgctacatgtcagacgttgtgccaggtgatgaagtggtcacaatgaggaagatggatgtggagagttgctgggtggtgcccagaagatcagtaattgggattttaacacattgtgatgagtttagaagggtggaagctttgaggactatagagacacaaaaaggcagaaactggaaaagagtttgtagaggtttcttaccttctcaaccattcaagttcatagcccatcttcccaactttgcatccatggttcagtagccgagtctgtggtgggcacctcattgatctttgctgctttatggttttatgaactctagcagcttcccctgcagacattgagacaccttgtagaacctaggcaagactgcagtggtacaggcagtggccagatcacacattatataagatgatgccaatacgtatagttatttaaatgtgcagctaaaatcgtcctgaatgttgttgcatcatttcaaatatatgacttacaaaagaagaaaagaaaagttagcgccgttcaatcatcctgagattgctcctttgcctgggacttgcaagagtaggacaggaagtggagaggaaaatgtccaggctctttgcaggctgaggtgcacattactggaaatgttgagaatcactgacagagcgaaccatccagctctgtgaaataggagaaaccaactagctggagaggtaggatgcatgctctgagtacttaacaatccttattttacaacttctgaatccgtaacagtttgaggatttggtagtcagtgatcctgctaatagctgcataatgagcccggtaggtcctcattgattcaccactcaccgactggtctgccgctttccactggaaggactaggatttcttcttctaacactgtttattctatggctgaatcatttgtacactattaaaaattctacgtgctttacgatatgtggaatcttgacctcacttgtcggaatttaatcaatgatttaatctctacctgtctaagcagctcacaatggttttcttatccaaaggatagttgcagaatgtttgttaattgggacaggagtaaaatagtgaatcttgtaaggatgaattatgactaaattcatgggaagtggacgatacaactttttaagctttattaagatacaatttaaataccagttcaccaatgatttctaattcaactaaatggcttttagcacatataggaagagttgtacagctgttgccactgattccaggacctttttagcaccccgcaaagaaaccccaattcctgttagcagtcattccccatttcctcctgctccaggctctggcaaccactgacctgcctcctgtctctatggatttgcctattctggacatttcctatcaatggaattatacaatatgtggccttttgtgactggcttcttttacttagataatattttcagtgtgcattcatgttgtagcatagcatgtgtcagtacttctgttttatagctgaataatattcaattatgtggatatcaaattttgtttatccgtgcatcggttgatgggtatttggttcgtttccccctttgaccattatgaataatgctgctgtgaacactcatgtacaagtttttgtgtgggcacctgttttcagttctcttgggtatatacccaggagtggaattgatgggtcatataactctatgtttcatatttttaggaactgccaaattatttccaaagtggctgccccattttacagcccaccagcaatataagagtgttctgatttttccacatctttgccaacactgctaaaggacagtataatattatataagactcttaattatttaggcattgattatctacaagggggttttctaggattttgtttccctttctctgtccccaagttactgatttgttgatttcactgtaatatctgattttgctttcccgaagagaggaaggtgaggagaatgtgggagaacttaaattggttaatatagctaaatattaacacctgttaacaagttgactagaaaggtttaagggggaaagatgatttaattagctcaagtgatgtttggattaatagcaacctctgtaggactggggatgtattcttaggtactataataatttatgtttttatttatgaaaaaattaaaaatttaagcatgtttcatattatctggatgaccatggtatggggaaaactgtaacttgatttttgtgccttaatttgcatttgattttaattctttggtgccaagaaattcaactaacatggcagcaattaacttactgcagagttttcaaaatatcttaaagggcctggaaaaatttttctagaagcttcatatgttacccaaatttgatgaggagtatcatagtcagtactcctgtggagttttcaagtaaagccctcataatgatggtgggaaggaaggtgtgttccctaagagtgaggcttggcataaacccttcacacattacctggaagtatcacacttcaattttaaaaagattcacatgaatttacagtgttttttaatgttacataataggtaatacctatttttagtatgtaataaagccttaaattatataacattcaataaaaatacctgtacctttccacagtgtactagaaaatgttccaatttgtgtagaactgacttttactcttcttttcattcctggtgggaagatcacttgagcccaggagtttgagaccagcctgggaaatatagtgagacccttgtctctacaaaaaccaaaaaaattacctgggcatggtggcgtgggcctgtagtcctagctacttgggaggatgaggtgggaggatcactggagcccaaaaggttgaggctgcagtgagctgtgattattgcaccactgcattgtagcctggacaacagagtgagaccctatgtcaaaacaaaacaaaacacatgagcagcctagtacatgtcgggcacttagtgttcagtaatattatttactttcctgaagaaaatggccaattaatggagagtagtacatttcaagagataaggagaagcatgatttctaacactctagaatattggattggctagaaaaaaaaacagtttgaagaggagaaagagatgaatgtgaaatgagcaagctgctgagtacggggtgagtagtgattacatatactggaaaagaggaacttagttctgtagaaatcttaacttcgtgataaaagttaccagcaacagcaggtggccaaataacaaccagagggcacctgagatgggtatgatcttactgttccagtttttattatgtttcagtcttgagaaaagacccatctttagaggaagacatatatctttaatttactctccaggtcctccataactgctacagtagctataatatttatgtgatggaatagtcaagtataaaataatattgagataaaaattttgacacaacagagactcagtaggaagaaattgtaaagctggaaagagtaaacagtgcaatagtgattaactacagaataagtgtatcaaagtacaactttcaaattgttaaaacgtaactatctcttaaatgtatcatgaatatgtgtcagaaatttatttagctcatcaatgagggaaccagcaggatgttgccactgacttagtctgtcaggaaaggcgtgctgagatgtttgctaaattagacaacactggttaatgtcctatagggcagtaaaactgtaacctttatagttaccttttctgaaagatagaaataatttgcatctctaatgagaaaaaaagaaatctgaagattaacctataacttacctctaattagtagtaaatagcaggtcaaaataaagtacgtcctagagaatgaaatcagttagactggctttggtgtgatattgaaagtacatgtgccatccttggccttatttccatgttctgactaattttaaaaaatatgtataaggattagtgaggggccattaataccaccagaaattactaggatgccttagacttccattgtgttccctggctctctcagtgggcatggggtttcctggaggctgatttttctcctaggatgaagtcccccaagaaacatgcatttgcttctcaaaaacagaactgttgttcttccaactcctcactttcccatgtttcctcccctgttacctcgtgtttgtttgtttgtttgtttgagatggagtctagttctgtcgcccaggctggagtgcagtggcatgatctctgcttactgcaacctccacctcccggattcaagcgattctcctgcctcagcctcccgagtagctgggattacaggcgcccgccaccatgccagctaatttctatatttttagtagagacggggtttcactgtgttggccaggctggtcttgaactcctgaccttgtgatctgccccccttggcctcccaaagtgctgagattacaggcgtgagccaccgcaccgagccaccttgttttgtttccagactcactggactaaatgtcaggtcctcccagcctcctgcccactcctgtacaaacagaatcataggaagtctctttataataaagcagcaagcctatttcaggtacacatgtgttttgctggatgttctaggaaggtgaaaaagagtctagaggtctccaaaaccctttgccattaaatccttcagacgcagttaataaaatccataggaatctcccacagaggcgttgttgagtttggcttgggattactatagaggtatgattattaatcttcattcttgtggcagtttacatcagtttctagataaatgttgattggaatttaaaactctatgtatgttcaagcaaggaggtgagttttgtttggtagtctctttttctttgtccttgttctttctgccaagtctgggtcgtcctgtgagggctatcccacgtgctgccacgaggacatggaaactagtaaagtttctgcaggtcagcaaagttagatgagtaccaccagcagcaggtgtcagctaataagcagagggcatttcagactggtacctcttcctcaggggtgatgcaggaccttttctgctgttgattaaaggattgtatttttagaatatatattacatattcttagaactataaaatctttttttttttttttaaggcagggtcttactctgtcacccagtctggagtgcagtggttcattctttgttctcttttcaggcacacaccaccactctcagctaatttttgtattttttacagagacaggattttatcatgttgctcaggctggtctcgaactcctgagctcaagcgatccgcccgtcttggccttccaaagttctgggattacaggcctgagccactgcgcccgccagaaccataaaatcttaaagttgaaggaaatctcagaggtttggaatccagcacccacgccagctgcaatccatgtttgccagccgctgagctcttcggaaggtgggaagctgggaagactgaatcttgctagatggcctgttctctgtaaacagctttgattgttagggaatctgtcacagaatgaaaaacaatctcattctacatactgattctaccagaaagtgtgcatctgaataaacttctgatccttcttccataggaaaagcactatgatgtcttccctaaaagttgtgtttttgaagctgaatgtctcagaatctttctgctgatttgtgaaataatatggatggcagattattgtgtaaatttatctgtggtttgtctgtgtttcttttaagatgtgttccttagaactgaacgtactacttttaattggccaatgtgtaggtttaggagagggatgggaaaaacttgcgtcttgtgatctaagctctacttctgttgtttgcctagacctgcggcaatgtattggaattttcaataggcgcataacagtgtcagatcacattggccatccaggtcaccacatctttgggttcttattcaaataaattgcttttgtttgtcaagtgttcccactaagccatatgtaagtaattgtaatccaattttttaaaaccttagctgtgaatacttattataataataatatatgtcttataagagagatagactagcatggtagttaagagtttagcactggaatcggaccatctgggttccaatcctatctcctttattacagtctgacattgagatggttaaatgtgttgatgcctggaaggtcccttcccatggctcttggttggtcagtgatcaacaaatgagagctattattctctttgccagacttgtacaaaccccttcaacgggcattttcttaatttaacccaactacagtttgatgaatactattgttattctgcctttgtttagatgtgggaaccgagctcagagtagctaggtaatttgttcagggatgtggcactcctgggtggcgcagaaggatttgaacatgggcctatctgatgctttagtggttggcacacctggttagccctgttgtatgtttcatagagcagtattttctaacccagccttctaacaattgtgtatcttagctgttttattaaatacttaattcatacaaagagtacagcatgtaaggacaaagacaagtaaacaccatgtatgcactgcgcaacctgaaacgtgaaatgctaccattttccttgaatgtcccacctcgttctcagccccaagtctcccacccaagaggtgacatcattctgacttcggggattatcaccacttaactcttctttattggttttcaacacataaaatattcctaaacaatatttttctttatgtagctgtttagtagaatagcataacatacgagatgtgaatataaagcaactttatgttttttgctctcggtggtccccttaaattacacgtgtgattagtttctcttgtgcccgagatgaaaaatcaagcagcctcatgactgttggtcacctccgggtcataaaaatctcacaatcacatcaagtttaaaacaaataaaacaaaccaaaaaaccccactcactcccacaatgaaaatacacagtttcacgtaatagtcaaaataatcttgctttaaaattgaggctcttgatattgacagaatgtgtctgattacgtccttgttcttttttttccccctcacaggaatgttgcagctattctaagggctttgcacgctcatgtgaattttaaattcagctagtcagtcacacacacacacacacacacacacacacacacacagagtttggattttgattggaggtatttttgaatctggacattgtaatggtgttatttgttcccttgccttagtgaggttatcatgcttattagcacaaggggcgggtttccaagcatttacctagacaagctgtgaccccctgtcatgtgtacaaagctcttgttggcctgactgtgccactcatcatcagctgtttgtttttttaagataatagtctattttttagagcacttttaggtttatagaaaaactaccccctctcccctgttcactgtttcttttattattatcattttgcattagtgagatatatttcttacaattgatgggtcaatattgatttactattaactaaagtccatggttgacattagagttcactcttttttttgagacagaggcttgctctgtcaccaggctggagtgcagtggtgcaatcttgactcactgcaacctccgcctcccaggttcaagcgattctcctgcctcagcctcctgagtaactgggattacaggtgcgtgccaccacactcagctaatttttgtgtttttagtagagacagggtttcaccatgttggccaaaatggtcttgatctcttgagctcatggttcgcccaccttggcctcccaaaatgctgagatgacaggtgtgagccaccatgcctggcctagagttcactcttgatgtacattctatggtttgtacaaatacataatgcaatgtatttaccattatgatgttgtacaaatagtacatatgttaaaatcccctgtgcttcacctgttcacttctctttccccacccagcctttggcaaccactgatctttttagtctccatagttttgccttttccagaatgtcatgtagttggaatcatgtagtatgcagcctcctcagcttggcttcttacattcacagtatgcatttaagtttcctctgtgtctttttctggcttagtagctcatttctccagcctgggggacagagcaagactctgtctaaataaataaataaataaataaataaataaataaataaataaaaagtgactctgacatatttgactcctatattcgttgatacatctaagtttatccttgccttttaaaagataataggtaaggatatattaccttgttgtgtgttgtgagtttactttttatcctaggatttaagtgcaaaaggacgttaagaatcctgggctatggaagagcttgatcttcctgcctctgagccccagaaccctcttttgtttgcagagctaaacagccacaccgagtagatggcccagcagcagtaaatgtggtgcccacagtcgtaaaggacagttgattctgcagggaacggcccgttcctgagcctctcctggaacgagtgtgtgcttgggcgctttctccaggttggatgccagtgttggcctcagagacctgtttgctttctttctttccctttttttttttttttttttttttagcttcacttgtactttaaggtacaatattagaatgttcctgtgactttttttttttttgtatttgtagatttgggataaaaatggaattaaaaagcctgaagggagcgggaggagggaatcttgcaaaatacagacggaagagagtgagaactgtcttattagatagtttttttcttttgttcttcatctgtttttgcatttattatttgagataagaaattttcattaagcaaaggtagtgaaacactcccaggagcctggaattacgttatgaacacggcttagtttgggaaataaaaatggcatcatacggaagcattccacttacttgcccaatttaggagtggagaagtcgacaagcaaacaggaaaaccctaacttaggaaacagtatgtaattcctggaattatggtgagattttttttttccctcaagttttattttaagttcctgggtacgtgtgtaggatgtgcaggtttgttacataggtaaacgtgtgccatggtggttggctgcagatcatcccatccctaggtattaagcccagcatccattagctattcttcctgatgctctccttcccccatcccctccctccccacaggccccagtgtgtgttgttcccctccatgtgaaatgatgggatttttactgtcaagctttctgaagttgaagttgtctcttccccagtgccctctttgtaaaagtataaagaaccattctgtagaggatgtaaattagtgtcagggtaatcaccaattaccctgacggtaatttaggggaaggggaagaaggggaagaaatactgataatatagcactcaactttttaagtagctttttcctaaacttgatcttcctgtgtctgagcccctaagaaagcctcaaaagcgctagctacattttgtaaagtctgtttttgtgactgaaaggggacagcacttctgtggctgtttgcattgtttccttaaactttgctgttgaggattggatgtgacatgtaaggctctctctgttatgtctaggtggacacagcaatgcagtgccttgcagtcatttaatggtggattcctgcaggcaagaatcaggatagggtaatttctggggcttaaatttcacgggttcttcaattctcaaactcgtttctcttttttgttggtaggtatttgggagaaagagctggaaagacacttttttatattattaaatacagacaattgatgagaagaatttttgtagtctctcccacagaaggataaatttactttgcagacatccaaacctaatgtttacaaagaagctctgaatgtttcaacaaatatttaatgagctgccattaggtgccagacactgtactgtgtgtatatgctgtggctctggatgattaaggtcatgtctttaaggagtttatggtctagtgagggtgcctcagtcatgcaaaaatgtaacttaatgtaatgtggtgtgtgttagatgaatttctgcacagctgcttggtttaatatagtaattgtaagtgtcaggaagccacagggggagtgtggcttcctgagagagacagttcctgcactgaagctcataggcaggttcttattgcatgtactcacagccagaggctaacccgaatgcctgttatgtgttagatacagttacaggaataataccatttaattctcactgccgtcctccagagtctctgttactgttatccacatttttcattttgcagatgaaaaatctgaagaaacactgtgttcagaaaacgataggaaaattgtgaatcttcctgaatcaaatatattttggaaatgcttaatttaactggtaaattgttttaaaagcattgtttttgttggcagacagagctttttttttaaattttagtaaaataggtataacgtaacattgatgacgactttaaccatttttaggcataaaattcagttgtgttaagttcatgatattaatatggttgtgcaactattactaccattcatctcgagaactgttccatctcccaaactgaatgtccatactcattaagcaacagctcccatttctcctcctcctcccagaccccagaaattactgttctactttctttctctacaaatttgacttctctaggtacttcaaataattggaatcatatgctatttgctcttttgtgactgtcatatttcagttagcataatgtcctccaggttcatccctgctgtagcatgagtcagaatttcttttctttttaaggctaaataatattctattatatgtatataccacattttccttatccatttatcaatcagtgaacatttgggttgtttctgcctgttggctgttgtgagtaatgctgctgtgaacatcagtgtataaatatctgttctgcatacatcaaaataataagagccatgtatgacaaacccacagccaatatcatacctaatgggtaaaagccggaaggattccccttgaaaaccgacacaagacaagaatggcctctctctcaccattcctattcaacatagttttagaagttctggccaaagcagtcaggcaagagaaagaaataaatgacatccaaataggaagagaggaagtcaaactatccctgtttgcagatgacatgattctgtatcctgaaaaccccaaagtctcgcccccaaagctccttcagctgataaacaacttcagcaaattctcagaatacaaaaccaatgtgcaaaattgctagcattcctgtataccaacagtgggcaagcagaaagccaagccatgaaagaatttccatttacaattgccaccaaaacaataaaatacctaggaatacagctaacaagagaagtgaaggacctcttcaaggagaattacaaaccactgctcaaagaaatcagagatgcaaatggaaaaacactccatgctatggataggaggaatcaatatcataaaaatggccatactgctcaaagcaatttatcaattcaatgctattctgattaaattaccattaacattcttcacagaattagaaaaaaactattttaaaattcatgtggaccaaaaaagagcctgaatagtgaagacaattctaagcaaaaagaagaaagctggaggcatcactttacccaacttcaaactatactacagggtgacagtaaccaaaatcacatggtactggtacaagaacagacaaatagacaaatggaacagaatagagaacccagaaataagatcacacacctacaactatctgacctttgacaaacctgaccaaaaacaagcaatggagaaaggataccctatttaataaatggtgctcggagaacaagctagcagaaaattgaaactggaaaccttccttacaccatatacaaaaatcaactcaagataaattaaaggcttaaatgtaaaaccccaaaccttaaaaaccctagaagaaaatctaggcaataccattcagggcataggaatgagcaaagatttcatggtgaagatgccaaaagcaatcacaacaaaagcaaaaattgacaaatgggatctaattacactaaagagctctgcacagcaaaagaaaccaacagtgtgaagagacaatctacagagtgagagaaaatttttccaatctatccatctgacaaaggtctaacatccaacatctacaaggaacttaaacaaatttacaagaaaaaaacaacaccattaaaaagtgggaaaaggatatgaacagacactaaagaagacacatgtggccacaaaacatgaaaaaaagctcaatatcactgatcattagagaaatgcaaatcaaaaccagaatgagataccatctcacaccagtcagaatgactgttatcaaaaagtcaaaaaacaacagatgctggccaggttgtaaaggaaaaggaatgcttttacactgttggtgggagtataaattagttcagcccttgtggaaaacagtgtggtgattcctcagtgatctagaaccagaaatatcacttgacccaacaatcccattactgggtatatacccaaaggaatataaatcattctattataaagatacatgcgggccaggcacggtggctcatgcctgtaatcctagcactttgggaggccgaggtgggtggatcacctgaggtcaggagttcaagaccagcctggctaacgtggtaaaaccctgtctctactaaaaatacaaaaattagccagacgtgttgggatgtgcctgtaatcccagctactcaggaggctgaggcaggagaatcacttgaacccagggggcaaaggttgcagtaagctgagattgtgctattgcactccagcctgggcaacgagtgaaactctgtctcaaaaaaaaaaaaaaaagatacatgcatgcatatgttctttgcagcactattcacaatagcaaagatatggaaccaacctaaatgctcatcagtaatagactggataaagaaaagtggtatgtatacaccatggaatactatgcagccataaaaggaacaagatcatgtcctttgcagttatatggatggagttggaagccattatcctcagcaaactaaagcaggaatagaaaaccaaatacagcatgttctcacttgtaagtgggagctgaatgatgagaacacatggacacatggtggggaacaacacacggtggggtctgtctgagggttggggatgcaaggagggacagcattagaaagaatatctaatggatgctgggcttaataccgaggtgataggatgatacgtgcagcaaaccaccatggcatacgtttacctaggtaacaaatctgcacatcccgcacatgtacccctgaacttaaaataaaaatcggaaagaaaataaaatctgttccagtccccagtttcagttcttttgggtatatctccagaagtggaattgctagagcatgtaatagttctgtgtttgagtttttggggaaccaccataatgttttccacagtggctgcactatttcacatttccaccaacagtacacccgggttcgtttctccacatccctaccagcacttgttattttctgtttttttaaggtaacaggcttctaaatagatgtgaagtggctagtgttgttttttatcaagacaaatcttaggaaaagaatgcagtatttgtgtgacttgtaaagataaactatgcaactgtaaagaaatgttcagcgttcagtaacctgctacctctgcgcatcacccaagatgcagactggctatcctgagccatcagggaggcagtcgcagtggattaggaacacagatgctgtggccagactacctggtgtaggtggtggccctgtcactttctatggtgtgatcttaggacctaacctcagattcttgcatctgtgaaatggatgtgataatagagggtagttgtgttgagaatatctggcgtatagacattctctctcctcctccacctcatgtgtaattaggagtaatttagggaagttggagccgcactgcctgatgggagccgctgaaagagctttcggcagggaagggacgagccttgttcttgtcaaaatgggctcaacaaatctgaggctgaaattcttttgtcagcaggctggaggaaggtaattagtgtcaggtgaggctcagagttattgaatgtgttcagaatcaaggacctggtggcctcccagaatagtgacggaactggggagtgatcagctttcttccagaaattccctgtaattgagggctttgttgccaaaaaggctgataataacctgtgttccatattcctgttaattagatgcaaagtggttccaattccaagttgcaccactgtggaataaaatacagaatatagattgtgcctgaggaatattgaagtgaaacagtgtaattcataatccccagtgctcctagcactccagtgagtgaatataggtggagtctgagttctccaagagtgattttcccttcccatgtggatgacagctcacattggcttttctccagtggatcggttagtcatgcagatcaagaagactggtggggactttccagactgatctttagttgcagataggtgtcaccttcttgtccagagggttcccagacattctcagttcatgcaccctggtttctcattaagacttttagggagcccataggccaaaagaaatccctgacagttccatttattaagtagttttaatcagctggctggaaagggatattgctaagtgtggagagaaacaaggagaaagttcagaaaagtttcagcttcttcagaaattaccgcacttggtttaatttgaagtcaagtgagagtctcaagaggtgaatactgtattcactcttatactgaagatcggatattggtgttttcctttataatctgaattttaccaaaactgggtggaaaacacaaagttcctagaaaatagagattgctatgtttttgttgtcttctggacaagagtctaatctccaggggagcatgtcagggtcagctgtggcttcctggttcctgccactgttgatgagctctcagcactgatgcaggggtcattctaacggaggtgcagagatagacatcatgagcctctggcttaggtgcccaagaactgtactcaggacaagccgatttcaggaattcgacttgaacacagatgtgatcacagtggtatcaagagtagatattttaaaggtgctatccccgtttctctattaaacctcagttaggcttttagttgtctcagatagaggtgtaagactttaatttcatttcatttttaattttaaaaggtcagcgtttttgttgaaactagattgctgcacttaaaagtatggggtaagggaattaagagatgaaaagacagctcttgccaaggttatttgatgaaataaaaggaggccaccagaggaggtgagaggacagcactgttctggtctctgctttcagttctgcgtgttaagtgagatcatgtggtatttgtctctctgtgcctggctcatttcactcagcataatatcctccagctttatcagtgttgctgcaaatgacaggacatccttttcatgactgaatagtactccgttgtgtgtgtatacaccacattttctttatccattcatccattcagggacacttaggtcaattgcgtatcttggctactgtgaatagtgctgccatgaacaagggggtgtagacgtctttttgaggtgttgatttcgtttttttggatatatacccagtattgggattgctgtatcatatggtagttctatatttagttttctgaggcgcctccatgctgttttccacaggggctgtactaattcacaatcctgccagtagtgtgtgagggtctcctttcttgcacatccttaccaccgcttgtaacctctggtctttttgataataaccatcctaacaggtgtgaggtggtatctcactgtgagtttgatttgcatttccctgagaattttgatgttgagcacctttttcatatatctcttggccatttgtgtgtcttctttgaaaaaatgttcagttcctttgtacattttgtgattgagttatttgtttattgagggctttgtttgtttttgctaatgagttgtttgagatcctcatctattatgggtattagtcctttacttgttatatgacttgcacatgttttctcctattccatgggttaccttattttgttgtttcttttgctatgaaaagccttttagcttgatacagtctcgtgtctatttttgcttttgttgcctacgcttttagtgttatatccaagaacttattgccaagaccagtgtcaaggagcttttctcatatgttttgttctacggtttttatggttccaggtcttaagtttaagtctttaattcattctgagttgatttttggagtaggaggccaattttattattttgcatgtggatattcagttttcccagtaccatttattaagagactatcctttccccattcttggtgcctttgttgaagttaagttgaccgtgtatgcatgggtttatttctgggcttcatattctattctgttggtctatgtgtctgtttttataccagtaatatgtggttttgattaccataagtttgtaatatagtttgaaatcaggtagtgtgatgtctccagctttattcttttttttcaagattgctttgtccgtctggaatcttttatggttctatatgaattttagggttttttttttttttgtatttcattggaatttcaatagccatggcattgaatctgtagatgactttcagtagtatggacattttaatgatattctcctaattcatgtttataggatatctttccatttatttgtgtcttcttcagtttctttcatcaatgttttataggtttcagtgtacagatctttcacctccttgattaaagttattcctaagtattttattcttttcgatgcttttgcaaatttgattgttttcttgatttcttttcagatagtacattgttagtgtctagaaatgcaactgaagaaaataaattcaactgatttttccatgttgatatttatcctgcaattttactgaatttgtttattagttctaacagttttatggtagtctttagggttttctgtatattagataacatcattttcaaacagactatttaacttcttcctttctgattcggttgcctttctttctttctcttgcccatttgctctttctaggacttccaggattatgttgaatggaagtggtgagagtggacatccttatcttatttctgatgctagaggaaaagctttcaggtttgcactattgggtatgatattagctgtggacttgtcatatatggtcttactatgttgaagaacattcctgtatgccatatttgttgagagtttttatcatgaaagactgttgaattttgtcaaaggctttttctgtatctgttgagatagtcctatgatttttagccttgattttgttgaggatttttatttatttagtaaatattgtgtatttatttagtaaggtgcatctccgttggacccagcctgatggtgggaatcacctgtctctcccctctctccatgttgtccagctggtcagcaggccatgttgactctctccccatcacctctccccagcccacggccaggattatctcatccggtggcactgacgatgatggcctctgctgccagaacttctgctgccggctcccatgacctttagagtaaaccccaatcaaaggcctaggctcccccaccctgtccctgcctgtcgtcctccagctggggtctctgtcttaagctccctgcaccccaacatccgtcctttctctggcattagagcatccgtgtgtcggctgaaggaggccacttcaggcttcataacaacaccagtgctccccacgtggctggagctctctgatggctgaacctcatcagctgttcgccattcccctactagtgtgtctaccccagttccactcagacacgagggaccaaggaaatatttactgaatgaatgaatgaatcaagtctcataggaagttctttcttgttcagagatgaaggaggccaggtgcggtggctcttgcctgtagtcccagtactttgggaggccaaggagggaggattgcttgaggccaggagttcagggctgtggggagctgtgattgggccactccagcccgcaccaggctgcactccaacctgggtgacagagtgagaccctgtttaagaaaaaaaaaaaaaaaaaggtcgagggaaacaaaccacaggtacctcatttaaatggaggacatcagtgttcctttctaagctatgttcactcagatgatgacagtcgtaggtagctttgcctgcgttccttgcttcatgtggtcctgaagtgcttatgtaaccaccccaggggcaactgaggcattggttattgccaaaccacctgactctgttgcatcaggatacttggcctaagaagaactattgggacttagagagttgattccatatcgttaaagttctgacattctaatcggaaaagaaatgaaccagcagactttgacaggttttgtggggaggagaggagagggaaagggtgaagccagcattgatttttaaattaagtttaaacacagttaagtgggtcacactgaaacacatgcctgcgcagtcactttgccagatattgaaaaaaagaaaggctggctttgtttggtggataggcaggctcagcctcctgaatcttgcttacttcataggtaagggctcttgctgagccacttgtgttattgacccctgaagttgctgccgttgggagaaaccacagtaaacaacagtcaaacaaaaccagctcaccatgtggtagatgtaccatgaggataggcatgtggccggtggtttagaggagctgaccttggagcgggtctgaccttaggtgcaatagcacatcgcagcagaggaagttacagtgatgacacctgtgtgctgccctgcttgggtcggcccgtctccacagcaccaaggacagactcctgcacggagaagttggaggaggaagatggtcaggaggctgaagtgactgcttgtattaaggaacattgtgggggtgagagggtgatgagagcagctcagagatgatgatcatagggaggagagtcacaggatgccagagacacagtacccacttcggaacactgcaaagggtctttttttgtttgtttttgttttgagatggagtctggctctgaaacccaggctggagtgcagtggcataatcttggctcactgtaacctccacctcctgggttcaagcaattcttttgcctcagcctcacgagtagctgggactacaggtgtgggccaccatgcccggctaatttttatatttttagtagagacagggtttcgccatattggccaggctgctctcaaactcccgacctcatgatccatctgcctcggcctcccaaagtgctgggattagagatgtgagccaccatgcccggccagggtctttcttatcctagaaagaggacaacacccttctccctgtcctttttctcattctgctaccattcaagcttctaagtcaaagatccagttcatcttttcatagaagtatgacttcatttattttagtatattactaatgaacaactttaatatagcgatcctattaatatttttaacataatttgtttacattataaattaagtgggaaggggaagatgatacgagaatcttataggaaaaaatgtgtcttcaagtctgaacaagtgacttaaaaattgatatttagaatactacttgttcaacagtttacagaacattttaccttctggtatttattatctgagtcagggttgaaggaatctgaaggcatgtatgatccatactcatggagaaaagatacagctaattttgaaatgaaataatggcattttatatatgtttggtttcagaggcatcctttgggaaaagcgatcaccttctccagatccgcattcaggtgatctttgccaatctctgactgagcctggtggcacatcacttctatctggccttgacctttgaggcagcaggatgactgcagggagtaggcagtgcttccatctgtgaatcacaaagcagatcaaccccaaagcagccacctgcacatgtggtacatcttctgcacctccatagacacttttacctaaggccagatgcatgtacaataaacttaaatccattgacttttcaacagattgcttcacgtctttggatctggaaattttgacccagaataccattccctattagcaatgacctataactatcaactttacatgttaccaagaaaggtgtcacgccatgagaataattaatattttgatgagaattttctctttacaatgcatgtgcttctctaaaagtaaaagaaactgctctaaaagaaattttaggatcccatggagaaagctgggttcagggatgttgtgtgactagcacaggtcacataacaaagcaattcaaagcaaagaaccctgaccccaaattcttagcctcagctgctgcccttcctccccttcacctgtccctcagtcttgctgagagggatgctccctggtgttgtccagtcatcactgggttccctgcatctgtgttgtcagcagcacatctgtttccctccttagttgcatggggactctcacttcccatttgcttctgccttgtaaagggtaacataaccttgtctcatcttgcatctccgctttcctttttgagattcaacatatttaagtattagtgattctttagttttcctagcaactaaactcagctggttttgaacttctcgcaaaagtcagaatatagtacttgctttcatttcagtccccactgagcatctgacatatttaaaacattattaagctgtgtcaaaggagccatgtccctgggatattataccagagtattcctgaattctgtgtgttggttatgttcgagcacagcgtctccctgaggacgcgctggcaatgagaacctccacctctaacaaagtctcacagatcgcctctgagagatggggtgtgtgctccagggacccctgttcaggaggagtagctggtcacctctggcttggttcattggtggcatcatgtcacatgactgtcgtgcatgtcctaaatgaggagatgtgtgccaagaggcagggagggcttgcaagaaaacaatatgcaaatctcagttcaattagaagacagtttaaattagaagcagaaggcatttcagcaactgctttaatgtgtaaaactaatttgagaggatgagacacttgattgcacagcacagggaaagggcctcttctgggcctctgtcctcaacagtggcaaaatggtctgtggggacatcccctaccttaagacctgataggctgctgggtggaagctgagttgaaaattaatctcatttcctcagaatgcaaagctataaattggggctctgcctggaaacacattttatgcaaagacaaaaaaattgaacactaaaataaatgcagcaaaaataaaatgcaacacacatatatgctcttacacacagttattaagtatgtctaattaagctgtggatgtaaaagctacatcattccctttaggggtattctgtgctgactgcactgttgggtgacttagcctgtgaactcagtgaacacagctccagatttgggccagtctgcctctgccaagcagagacattgtttttgctccagtgaccatcacagtgccttcaggattagggccatccatctggaaaattttcattgccctgaatggtaaatgtgggggaggtgcagtcttgtggtgacatcagttttggcatgggttgcaggcatgaggtagtcctaaccgggaacttcattgttactgctgcaatcttgtttaccaccagaaaggtggtggacaggccatggctgtaggaagtcaagacgcagggcagtcttcagggctgagggctgtgactggcaacagctcccctggagccttccaaggttgctgtgagattggaggaagaggagctcagaggctgtcactgtgcagaggttggggacgcaggcagggaggggcattatggaggatgccagcatctttcgcacaagctcagacctacctgccctttcatctctcactacaccagcctgacctgcaactttagacacagaaggaagattttcctttgtggtctaagacctgcctttgcaaatccttgttttctgcaccccatcaccccagaggattgacaaagcaaatatgaatccctattggggaaacaccattctcacccacaggaatgtgttttagcccagtaacccccataaggcaagccaagacaatcacacgcttgtatgaaattgacacctttccaaaagatacgcttattctagttgcatttgtccatatactttcaattcacaaacattgaacttcagtgattgaatacttaagtgacgccagagctacagatgctcttttgaagcatcttacctactccttacacagagagaccctgaaggtaccagatcaaagggtaagggggcttctttcttttactaaggtatgtatattggggctaggaagaggaaggacggtgtctggcattaggcctggggaataacttcatctctgaaattaggaccttggatgctttctctttatgaatgttgtaaattatggctgggcatggtggctcatgcctgtaatcccaatactttgggaggccaaggtgggaggacgatttgaggtcaggagtttgagaccaacctggccaacatagtgaaaccctgtctctactaaaaatacaaaaattagtggggcatagtggcatgtgcctgcaatctcagatacttgggaggctgaggtgggaggatcacttgagtgtgggaggcgaggttgcagtgtgctgaaattgtgccactgtgtactccagcctggatgacagagcaagactctgtctcaaaacaaaacaaacaaacaaaaacaaaaacaaaaaaaaggaaatgataaatttcagtggttttaactggccatggtatgtacctgttatcccagctacttggaggatgaggtgagaggatcacttgagtctaagaatttgaggccaccccgggcaacatagcaagattgagtctcttaaaacttttttccagtaatttcagaaaaactattctgaaactaattggtagcacattcatggttttcagcactctctctctttttattacaattcttcttcctaatagcatcagtggccacagttgctgctagacatcctacaaagcacaggtctgctcccacaacaaagaaccatctggcccagatgttggggtatcagacctgagatgtgcaaagccagcagccccttcagccagtcattcaacagacacatgctgagaacacagtgaaataagacaaggcttctgcctatagagaactttccatgctcctcagagaggttagtggagaaggcagacaaggaaagcagaatgaccgggcagtgtgggaaacattagagaactgtttctaggtatttcaaacagagaatctaatacaggggttatttttatacagctgagaaacagaagacagtgcaatagcaggaagttgctaccagcccctgggctggagtggtaaacaagagggcgtgttgcttgagctgggagttggtgctgcccacaggacctcggacctgggagggaggagcttcccagcagggctggagccacagagacaccacagctgctgcacgtgcccacaaaatactgtggcaactcccttcccccaaccctcaagtcacctcccaccaccactgcccactgccaaacctggacagaagccatttgtcaggaatctgggaattgtggttcccaaaacagagagataacaatggctggagaaagagcctgagagcagacaaaactcgcaaaggcatggtggtgtgaggatcatgacaaatagctcagccctgctggagggaaaggcgtcctgtattaggcacaggacattcaacatctcctcaaagtccacaggcagccagtgaccctggttcagtgacacacccatctgcagtgtggaatggactctggcagcagagtgaaggatgggtgggcagtgagccagaccatggtcatccaggtggaaggtaatgcaggctgggaatgaggcaccagccaccatgccgacaaagggctggtgggcatgcagtagagtcgcttagacctggtgtaatctgtagggaaggaagagggtctagcatgacccccaggttctggccaggaggtagcagtgctggggtggaccctctgatttccaccctgctgggctgtcactacagcaatggtagtaagctactcagcctcactgggccctagcatcctcactggcatgaataggggtcacatgttccctagggcaacattctgtgcagctgtgatttaagggtctgcactcactccttcagcattttggatttcaatatgttttctttcagtgtcactttgttatcatgtaaatcaagcttctctaaccagtgggccgcaggctgcatgtggcccagggaagctttgaatgtggcccaacacaaattcgtaaactttggtaaaacattatgaggggtttttttttttgcgattttttttttaatctcatcagcagttgtgttagtgtgttttatgtgtggcccaagacaattctttcaatgtgacccaggaaagccagaaggttagacactcctgatgtacatgatgagtatattacaaaaaccttcctgcttttttgtacatttaatctgttctatattcctgaatttcaaatttaagtttttatttaaaaattactggtcagaagcttttttgtttgtttgtttcatttttttgtttgtttgtttttggtgcaaattctcattatcaccaaaaaaaaaaaaaaaaaagtttcattctaaagttcatacaccctagaatccagcttgtagacagtggatttcacaatattcctatctgaaattctttcttagttctgttctcttcctatctctggcagagttcccacaatttataagacttgctacaaaaccactaattgaattgcaacccttggttagttaattgaggtcaaattattagttctaaataatgcaacttggtatgttactcagaaattccaggaaaaggctttttttccataattttcagtttcattcttagcagcacacaacaatcacgttgttcagctcaggaacaaaatactaagtcactggtcgtttaaaaagcatattgtcccaattagaaaccccaattttttgcatgtgttttatgaaatctgaatcctagaaattaagttctgagtgttagaaaatttcaacttcttcactctataaaaacatagtgggttgtaacaacttcttaccttggtacggattagacaaggcaggataactgatacgacttcacatcgaagttaaatctaagtgtgcaaagcacagcattcttaccctcagagagtgcacagtcttgtttgaaggcagccatataaagctatcattataatccattttggtaaaaacaatttgatgagatgcctgaaggcctgtggaagcacagagtaagggatttcattcattgcagggggctcaggaaggaattcctggggaaggagacacctgcagttcgtctcaaagaatgatgaggtattagattaaggatgtgtaggcttttctaaacccactttcaccttaattttactaatttatcgcactgagctttccttccaatgatactgttctacttactgtagagtgatcagttaccccatttgcaaggaactttgctggtttcaaccctgaaagtcccatatcctgagatacccttcattcctgggtcagtcagacacctggtcccccaaatgtactgcctcccagttgtactgtgtgtcgttgactgttgctttgctcttgccagtttcttatctagaatgagcgattaccttatcattgccttgaattcctcatgggacccgcacagacgcttgtacccagtagatgctcatgaagtgggtatatgcataaatgttggtacctcttcctctgtagacagcactgaaatacagatcactgaaatgactgactcaagagccatatgacagcaccaaggttaggccgattcccatgtcttgggcccttgtttccttcttggttataaaaggtcttatagtgccctctggtggtgtcaggaagctgtctaatcccctgaattacaaggcagaaatcatgccttctcttctgtattcagtgcgagtcataagaagaccattactactaatgtcagtgcctgtgaactggacttgaccttttgattaaacaatctcattcatttcatgattctgagatgctgaaacaatgaaattccctatcccttctagagcacatgaggttggataggtgatatcaaatgttgaacttactttgcaactggttacaggcttcatatccagtctcatcgcagagatgattcaagcctctgcttatgtggctcatccaaatgtaacccccagctcctctggccccctaattcctccattagaacattaaactgcagagggcgtgtggtagcccatcagtcttctgatgaatggaattggctgatggtctaagtcatcgtagcctcccttgtcccgggtggaatcaactctttgaccctttacctatggctgtctgtgggaatcccttctcactggaaatgatgtaggggcaaataaaaatagaacccatcaagaacatggggcgtaggagcagaagagagatgtttctgtttgcatggggtcagattctgcacttgatagggatacgctaaattgggatctgatctcaagatctttaaaaaatgtcctcctcttgttcctctcttgcctttggcctctgtggccttggaggtaatggcattgactgatgtctaaagatttttgggatttatttacagtcagggtcgtgaggcccaggaattggagtcagatgcctggggtacagatgcccattgtgcttctctgttcattagtttactgcagtggagaagagtgtgggctttgtggggacagctgcaggactcccaggcaaatgacctaacctgcctgagtatccatctggttgtctgaaaaatgcaagtcattctgtgacctcttaggtttctgtgtgtactcagtgacgttatgttttccaagaccttagggcagaggcctgacatatagtaagtacttaaaagttggtagtcttttatggttattatcataatctatcattcattcatccagtaactatttattgagaacggggggctgagacatgtaggctatcacttgaaggctaagcaggtcttggcctgatgggaaaggttaagggggagcaggattttcatttttcaggggagggccatggacccaggtgtggggttgaagggtttggacacagatgtgcatgatggggaaagcatggacaagatctgaggggaagggatggacacaggtgtgtggggaaggcatggacacaggtgtgtgggaaagtatgtatacaggtgtgtgcagtaaagatatggatacaggtattgggggaaggtgtggaagtggatgtgtgggatgggcatgggtgcagtagtgtgtggttgtcagggcacgtgggaagaggaaaaagatgccgaatttgtttaatttgaattcttacctctgaattttttttttttttttttttgagacggagtctcactcactctgtcgcccagtttggagtgcagtggcgcaatcttggctcactgcaacttctgtctcccaggttcaagcgattctcctgcttcagcctcccgagtagctaggattataggtgcacatcaccacgcctggctaatttttgaatttttagtagagatgaggtttcatgatattggccaggctggtctcgaacgtctgacctcaggtgatccacgtgcctcggactcccaaagtgttaggattacaggcgtgagccactgcacccaaccctgaatttctaatatacttcagcagcatcctcacttctctctgctgtatggccagttggaaaaagacccccaccaatgtgtttccttctcagaggctgccctggcatgtccttgctgagtccttcccgcctgtgtctaggtggccctgtgaggctctcagttagtgtttgggcgtctcagccctcctggacaggaggcagctgccagcatgtggggctccatctctgctcctcatgcttattcctgcgtgtgccagcacttggtttgagtattcggtatgttggattcaacacaggctgccattttaatgtcatgcttttgaaatcgttgtgaggttttcttttggtatttcctaattatttttttttccatttcaaataagaagaaaagatagtgttgaatgatacctagatattttcattccagcggtttttttcctagtctcacctacacaggttccagtgagctcaggagtttaccttcatgtccgtggcacagcccataattacccttctctgtccagggatgtatatttgcatctttccttcaacttatgaagtgaatggaggggaaatgtacagttttaattgagtttgaagtagctttcatctgaccagccctgtgctggagcgtgcctcttcttctgtgagcagaggggctactgcgtgggaaatggctaaaccgcctgctttgtctttcactgcagcccgtggccacccaggagcccgatgtgcaaggcaggtgtgagtgccaggacggcattcctggagatgaaggcctggagctgcggtctgcggactcggcagtgcccgtggccatgacccaggctgccgtgcggccctgggcaccctgcctggagaacatgaccactgccccaaacggcctcgggccaggccccgcagccccctgtgcaggctcggacctgaaagacgccaagatggtgacctcccttgcgtgtggaaatggagtctgtggctgcagccctggtggcgacacggacacccaggaagccaaactcagcccagccaagcttgtgcgcctcttttccaccagtcggaagaggacgggtgcccaccccgagcggccccactccatggtcctggtggggaactcctccacatggaacaccctcgcctccttccggaaaatgggatcctttaagaaactgaagtcctcagtcctgaaaggaattcagagccgagaggggtcaaatgcctgttcaaagggagaggcttcggagcatggcctgggaaagtccatcccaaatggcgctgtcccaggagcccaggcaagcaggggctcccccttagcaccgggaccagcatgtggtgccctcaggccagcagagtggggcacattggatggctccgacctcgaggacacggacgatgccttccagcggagcacacaccgctcccgcagcctccgcagagcctacggcctgggccgcatctgcctgctggatgcgccccagaaccatgcgacacccacgatagccactggccaggtgcccgccgtgtgtgagattctcgtgagggaccctgaaaacaacagcatgggctacaggaggagcaagagcacggacaatcttgcctttctgaagaagagctcctttaagcggaagtccacctccaatcttgcagacctcaggacggcccatgacgcacgggtaccacagaggaccctgagcagttcctccactgactcccaaaagcttgggtcaggaaggaccaaacgctggaggagcccgataagggccaaggactttgacagagtcttcaaacttgtgagcaatgtgactgaggctgcctggaggagggagagtcctaggagtggggccccatcccctggagaggccagcctgagacttcaggcacacagccggctgcatgacgactactcccgccgcgtctccaggagcactgagcaggacagcaggcggggcggggcggtcatgcatgggaccactgcaacctgcaccgtggcccccggtttcggctcagccacctctaaggggccccacctagacgctgacactgccgtatttcctcttgaaaccaaaagttcctgggcggtggaaagcgacagttcctgcacttgcagctctttgccaagcccgattgtccaggatgtgttgagcaaagactcctgtgacccaaacgctggcagccagttgacatttgaccctgagcagcctcccacccctctaaggcccaccacacccaagccccagagccctcagagcccccagagccccggggcaggaagtgccagctgtcacagcaatcacagtgccctgtccgcgaattcagaggaaagtgaaggaagggcagaagagcctgctcagagagagccagggcctgtgtccttgcaggatcccctggaagccacacatggtgatgagggcagcaaggaccttctggtgaacattggtgtggcagccggcccagaagaaaaggagaaggaggaggtaagggcagcggcgaggtccctcatgtgggcgaccctcctgcgggaagggagcttgcacaggtgttgcccttggtccctaacctgtcaaggtcagtggccctctgctgaccttgttgcccttacagtattagtgggaatgggagttgtcaagttgctgtttaccaagttcagaagtaatctctatctcctttgaaataaattgacaatgtacgagattcattgagatgacatttgccacacctttcattcaaaagatgtttattgaacatgtaccaggtactagattctgggggaaaaaaataagttgtaaacaaactgtcttctgctccatgcagctctgactcatatctttcttctttgtattttaagctgtttctgtaacctttcccacaaagtacatataagtgaaattctttctgttaagagactattacctgtcctaatgtcacagcacctgtgggtgtcacttgaccagctggaaacctctgtgggctggcagtgcctctgcttgagttttgctcgtgcccactagcctcgttccacccattctgcccagcaggctgcattcggcttgcactgccagcccagatcccatgcctgccaagggcaaaccaggaatggagcagcgaggggtgtgtgagtgagtgagcatggagtccagcctctgcacacagccaggcatgtcagctgttgcagcagggcaggcagctccaggtgccggcacaggtgctggctccatgcaaggctgtggctggaccagatgcactgtagctggcttccgctgcaggcaccagcgtgtggacgaggggaacgtggtgacgagtgaaagctcagagataccaggaatcacagagccccaaagagggtgttacggcctgtcacagcctggttctcatctgggctcccagaagggccacagctctcttcttctcatcacctgcattacagcaagcaggggggcttgtttctgggagtatgtttcaccccatttgtgttatatctccttcagtcccactgccccactccagcatgcagctcttgggctggtctagccccaccactgcttcctgttgcatgttgcagctgcctggtgctggtggaaattgggagggttatagtgttacaactttagttgagggaatcccaaggtttgggcccccagaagggttgccactcttcacgcctgcagtccaggggcatgtcactgtctgtagctcggtgagctggccaggaatttgttgcagcccctttaactcccacctgcagctgggcgagccatccgggaaagtgttacagctcctttcgctcccaccattgggcaggttccacatccaggaaaaatgaagttacgtggacaaacggagggtgagcaaggctgagaagagctttattgggtgactgaacaactctcagcccataggagacctggaatgtgttgctcctctctgcaggcaggtagtcccaatgagtggcggagtctgggggtttttataggctcagaatggaggaagtgcatgctgattggtccatgggcaggcctggaaaaagcaccatttgattggttgaaaggcatcaaggaagttctcactccaggtcgctgacttcacacgaaattggcatctgtgccctgaggcttcaggctgtccctggcttgaaggtggggtttcactgcggacccgccccttcccacctaggtacctgtccacctcccaccaccatcactaagtctgtttaatttcctaggaatgaattaggaacatgcagtttggtacctgtcggcctttgaatgatgcttgtttaaagagatttttatgatgggttattgtacttattttagagtagatcataagcacctcattaattgactaagctaatagctgtcaaggttacaacagcagtttttttcatattctatcaaacatctttataattttcactttataaacactgagtaatattaccttacatagctggaagatggggaaatgcattcatgtgtatatattgcagattattcttcacatacatttctagattgatttgcaggtatagatggtgcttgccatagagaataatcccctagcaaatgctccttcccacccatccctggggaggacctcagttttgtcttagcacctacagatgaatgattgcacagcaagtttgcagactcagaagccaggacagcctctgcactgtccatcttgacctttgctgtacagacagacctggttagtagaacctttgtagaaagacctagaaagtaggactatcgcagagtactttcagattgagattagtctcaaggtcccctgggcagccagagaagtgagactgcatattgtctgttacctgaggttcccgtggagagctcaccagtttgagaggtcttgactattgagaaccgtctgctcatttgcatatttgagcctgtggagcagttgtaaggacacaggagtagttaccagacttaggaaggagttccagttctgttggctcctgtttgtacaactgaccaaacttcactaattcctgggtgagatgaaggatgaagggtaacattccttccactaaacaccctacctgcgccactcgtagtttgtaacctcccctccctaaaaaaggatttgtatatgtctggagggtttttttatgttaaagattggattttattttctgcttaacagaattatttttttaaaaatcattgaaatattttattcctgagaacctgttaagtgaatatatatgaactagtgtgtagttatttgccagggtgattttgaccattttatggttttatatgtatatttgctattgttagttatatcaaatttaatttctacccacaaaagatcaccaaagatagaaagcagaacaacaattatattgaaattcagtttattaaaggtgcgtgcacatgttgataattctacgaatttgcctccagatattcatcacatttttcagttgcagtcatttcttcaaaattcttttttttttattgagacagtctcattcagttacccaggctggaatgcagtggtgcgatcttggctcactgcaacctttgcctcacaagtttaagcagttctcatgtctcagcctcccaagtagctgagattacaagcgtgtactaacatgccagcttaatttttgtatttttagtagagacagggttttgccgtgttggtcaggtggtctcaaactcctggcctcaagtgattcgcctacctcagccttccaaagtgctaggattataggtgtgagccaccacgcccggcctcagaattcttatatagcacatcaggcttcctcttgtacttttgttttcttgagatggaatttcactcactctgtcaccaggctggagtgcaatggtgcatcccagctcactgcaacctctatctcccgggttcaagcgattcttccgcctcagcctcccgattagctaggattacaggcacctgccagcatgcccagctaattttttgtaaaaatagggtttctcccctcttgtactctttttttttttttttttttttttgagacggagtctaactgtgtcgcctaggctggagtgcagtggcgtaatctcggctcactgcaagctccacctcccgggttcacgccattctcctgcctcagcctcctgagtagctgggactacaggcacctgccaccatgcccggctcatgttttctatttttttagtagagacggagttttaccatgttagccaggatggtgtcgatctcctgacctcgtgatctgcctgcctcagcttcccaaagtgctgggattacaggcgtgagccaccgcgccgagcctgtactcttaacatatatgtcaaaaagagaaaatatagttatggctttacccataacttatacattgcatcttatacactgggaatgttcggtgttacttgtagagaagtgcttgtgaagtagaacctgaaaccttttttattttggctttgggaaacaaaatacaaactaagggaaacaaacaggaaaagggtgacacgcaaggattccagccttcatgagttaaaagcaatttttgtctattttgtagcattacaaaattaaatttcagtctttactatttttcaatatacagtttttttattcagctcattaacagtaaggttctacttacaggattaaagcaaatttaaacttattgttgaatatgaaaagttgtaatcaacatatattatggtgttatttaaaataaatattataatgtactttcaatagggagaataatttttatttagaatcacttatttatatcatactgtcctaaaaataacaaaataatcgttgaaaaattttaagcagtctaacaagattgtgtattgctgtgaaaaagagctgggaaaatgtcctgccgctttaatttacaaagcatgccatgctcctgccacctagtggtaagctttaagagcagtggtttgttgaacaagtacttaagcttgtgacctgttttaagttacaggttgcatttacttgttgacagtgctgtctgttgccttatggaggtgttgcctaggagtctggagcattcatgctgcttctcctaccagctcacaaggagaaaccccctctttagtgagtggaaactcaggcagcagagtcagtggttcaggtagtgctaaatatgccatggaaaaaactcttaaatgatgacaaccaattggacccctctccagggagctatggtaagctgcagtctcttggcacatgtttctagttgagttgggaccctggctctattattaaaagatccctggcaaccggggcaaactgttgaacttctcctgccgtgggtcttctcaagggtaggatatggagtaacttcatctgcccctggggatggtaagagccagtgaaattatggatgtcaaacacttagcccgccctttgacactgactgcccactgtgtggttatcactgtttagatgatttttccatcctagattgacatggctttttaagacagggacgttaaggtcggttctttccagaactctttttcaatataacactgttacagtcttacaggggatggagaagttcttcaaacagttagtttgacatcatgctacttaaaaaaaaagcataagagttaagttcctgcataatccaacatttatattttcatgaaaccatgtccccaaccaaatttgttgaacacatgtcagatacaagagaccagttaggtatgactctatagggaatgtggtgatgccaatgaagttgtacctgtgcccagatacacttaaaacataggagaacttgatggattcaattccataaaagtggtaaaagcaaaatgctatgggtttcagaggacttgcagttctcacccatgtaccaaatcaaggaaggcttcataagggtgactgaatctgatttgaagaaggaggatttctacagatggttatggagaggacaggggcatttcagtgaggtgtagagtaggttgggcatgtgtgcagagatattctgtgattggagagaacaggaagtaatgtaatttggtttgatatagaggaataatccaagttaagatggaatcattaagcagaagtcaaacagtgcataaggaattgtcatgtacctcaccactcaacacctgctatgtgaacagaaggggttgaaacaaaaagaagctgtctgtactctcatgggttcagagcctagctggtgagaggaatgtgtgcaggtcattatgatgtagtggtaagggctcctcatgagaatgcagtaagtgccgcaggagccccaaaggcggcagaatgaagaactctggctggaaagtggcagaattggggagggacagtggagtggggtctttagtgccccgggcggcggttgcagaagggcactggacttccaggctggcgggaagagtgtagaacaggaggcagatgcccacatctgagctcagctctgctgcttaccagttctcgacctttgctaaacctcattttccttgcctgtaaactgtgggtgataagtgtcccgaccacataggatcgttgtgcagattagctgaggtgatgtgtggacttaacatggggctttgtatataagtttctagcaaagtgatgcatctattgtgctcagggagctgcagacggcttgcagaacttctgtacagggtggctgggtggagaggagggagatcaggttaagcagttaggtctggacatcattaggaagggcctcgcttacagctgtgaatttggactttactctgtaagtggtggaaagtcagtgacattgtcagggcagggactcagagggacattccgtggctggggttgatcagaccagctctgtagagaggtctaatttgcataacatcaactcaccggttgtaggtatgcagtttgatgatttttgggaaatgtagtgtgtgcagccactaccaccgtccagctaaagaacacttggctccccccagaaggcttccccacgccttttaccaatccctgttcccacccaagactaggccacagctgatgggctttgtgtctacaccttttattaagcgaacaattcagtgatttttatatgtttatggagctctgcagccatcaccacagactaattttagcacgttttcaccaccccagaaagaagcctcgcgccatttgcagtcactttctgttcctagccccagcctcagagctattttttgtgtctattattttacttttctggacatttcatagaaatggaatcctgtaatacgtggtcttttgtgactggcttctttcactgagcaaaaccttgttttcaaggtttgtccatagagcatgatcagtgcttccttccttgttaaggctgcgtaatatttcagtgcatggctatctataccgcactttgttatctgttcatctgttgatggagatgggttgtttctgcctttttgctattatgagtaatgctgctatgaatacttacatacaagtccttgggtggaaatatgcttcctttctcttgggtggatacctaggggtggaattgctaggtcttgtgacatttctatgtttaattattcgaggagctgccaagctgctttccaaaatggctgtaccattttagattctcaccagcattgtataagggttccaatttctcctcatccttgccaggacttggtattgtcagtattctggactctagctattccagcgggtgtagagtggtatttcattttggctttaattagtatttccctaatgactaatgatgttgaacgtcgtttcatgtggttattagccattcaagtgatctgatttagtgaagtgccgattcagatcttttgctcatcatttcattgcattctttgtcatccttttattgagcagttaaggtttctttatatttcctggccacctgtcctttatcagataatatgattattcagggttctccagaggacgagaaccaataggatacatatgaaaatcggctggtgtgattaaggccaagtaccaagatctgccatctgcagcctggagaaccaggaagccagatgtgtagttcagcgtgagcctggaagcctgaggacaaggtgatggggtggagtgctggtgtaagtcatggagtccgaaggcccaagaaccaggagcttcagtgttcctgggcaggagaaggtggatgtctgccaggagaggaggggaatcctggacttttgtcctatttgacacctcaagggattgcagatgcctgcccacatccttgagggcaagtcttctttactttactgattactgattccaatgccagtcttttctggaaacaccctcacaaacgcacccagaaataatgctttatcagccttctggggattctttcacccaatcaagttgacacatcaaattaataggaattacaaatattttctcacagtctggcttgtcttttaaattttttaatatttttcttttttgagacagggtctcactctcttgcccaggctggagtacaatggtgcaatcacagcttactgcagcctcaacctcccaaggtcaagcaatcctcctgcctcagcaccacccccacccagtagctgggactacagacacacagcaccacacctggttactttttgtattttttgtagaggtggggttttgccatgctccccaggctggtctcgagctcctgagctcaagtggtctgcctgcctcggcctcccggagtgctgagattacaggcatgagccaccactctcagcccagttttataatattttttaaagagtcaaaattcttagttttgatgaaaatacagttaccaaatttttgtagttttctgtagatctgagaactctaagattacaaagattttcttctgtgttattttctggaagttttatcattttagctcttacatttaggtatatgccccatgtttagttgtttttgtgtgtaatatgaaggttcattttttaatatatgaacatctgtttatccagcctccatttattcagccgcctatggtttttgtactgcagagaatgtaagtttccatattcctctgggttctcattcattttttttctgacaaaaacattacagaatttgaatcacaaaaattagagttagaaagataatttttaaatataatattatgtgtgctttcaaaaaatgtttttctaatgaattgaacatgttgttgcagggacatttgccctgatatgacagttagtgttttatgatatttcctaaatagtatgcttggggtagacatgcaacagatatcttctcttacagagggctttttaatgtgatctgaagagaattaatgtgccttctatgagtcatctttgtgctagtttatgttcagtttctcctagaatgtttttagcttgtttttgtttcttttccttttgctggagaaaaatgtgaaaaaggatctattccagaaatactaaatcatagaaattcacatcatgagtctaaatgtgaaagtagctttttactttaacaatggaatcattttctaagtcagtttaaaaaaaaaagtttccatttgctctgaaaaggtttatgctcattattacctaattctttttcaacggaaagtttcaaagtatttctgaaagggtgctcaacatttgagtcaggcatttcagtacagactagttaaaccggcaaattatgtacttgtgaagttctagccagagtgaggaccccctgggatgcaagccaaagctgcggaatcccgagtctcctccagcactgctgacaggctacagaactttatacacttaaacacacacacacacacacacacacacacacacacacacacactgataagattatttctacaaatgcagaatctaaataaaattatcgtatacctgtagttttgaactttccagtggctcatttctagaatagtttctctagtgagataccattaaataggattttctcattaaaaataaggggggaggtagatggaatcatacccctatacctgcacaagagactaaatgccaactcttatagaaattaccacagtaaccatttgtaatcaacttgtcatgatgtactgcatcttattaatgctatgcatgttaagcttcctgaagtttaagaaatgataggaagcaatatcataatatattcttcagtgttttcttattttatcttaattagcacctcattttaatttgtggataggagggcataattagaccttagtgaagtactaaatacagaaaggtacacttccatattcttcagagggggaattttagcttgatgactaagaaactgatttcagtatacgtttttctcctcttctatatttctcttcttgaacttctctataacaattaagatcaaaggccacccagggtggaattgctttcaacccggcttggtgacaccgattgatttggctgtgtctgccatgatggtgatgattagaaggaatgccgtacgttttgttggtgggggccagagtacacattgccagaagtcactatataaataacattacctgtttcttctacttctgacagtctggggacaaaaccaccacttgcagtgctctggggcagacttcagggagtcaactggtgcaggaatagagagaggggccctgtggattggagaggatatagcactcacagctgcttgctgccctgcactgatctagtaactttctaggataccaggatccatatggctgccagccagccattcccaatttgagtggtcaggaagctggatggtgtaaggtagttgggccttgttctgctgagttctgtcctagttttattgctaactagcagtatgttcttaagaaagacacttgacctacttaagcctcaacttcttaaaaaattgggattatagtactgcctgaattaaatgaaataatgcatgtatggtacttaccacagtgccttggaacatggtaaatcgggttaatagtagcttttataacagaaatcattgttatgattgaaattatttcctttggtcaaacatttcagtacagaccagttaaactttgcaaattatgtacttctaagttatagccggagcaaagacctcgccctgagttacaaaccaaagctacagattcctgaacctcacccaaagctactgaattagagtccctgaggtttagacccagaaatttggactatcagcaatcaactcgggaaaatgacttttgtcaatgcaaactttgagattcgctgtccaggctgaggctcctctaggtataaagtgtcctgtacttctccagaatagagtgattgaagccagggaggcatgccggaaagagagaaagattgcttgtaaaaacttttcaagcaagaaatggtgtgataaagaattggtctggctgacgtggtggctcatgcctataatcccagcactttgggaggtcaaggctggaggaccacttgagctcaggagctcgagaccagcctggacagcatagtgagaccttgtctcttaaaaaaaaataaaaagccaggtgtggtggtgcaagcctgtggccccagctacttaggaagccaaggtgggaggattgctggagcctaggagatcgaggccacagtgagttatgattgcaccacttcacttcagcctggctgacagagtgaaaccctgtcttaaataaaataaagaatttggtctaaaatatgttgagcagtgtaagtctagcaattgctccatccactactgagaactagaatttttaccaactcatttgggattttaaaaaagtaactgtttcttgaaaataagaatataaataataacagctcaaattgatatgccttttcagtggatgaagttccatcatgcaacactgttgcattcagttttcacagccacttgtgacataggtgatttttgtatttgctttaacagatgagtaaactgaggcttggaaaagttcaaggactgtcacataagtagtgaggggtggggtcgggcctgcagctgggtttccaaatggggaaggaggcctagaatcagcatctgctttgggatgtggcttgcagacatgctcaccatttattagcctcctcatctcttgaggaatcacttaatctttcttatctgtaaagtagaattaaatgcatctacttcagagagtttttaaattaaatgacataaatgatatcttcaacaacaacaaaaaacacagccccatttaaaaaatgggcagaggacttgaatagacatttctctaaagaagatatgcaggtgagcgggtggatcacctgaggtcaagagtttgagaccagcctggacaacatggtgaaaccttgtctctactaaaaatataaaaaaaaattagctgggcgtggtggcacgcacctgtagtcccagctactcggggaggctgaggcaggagaatcacttgaacccaggcggcggaggttgcagtgagccaatattgcgccactgcactccagcctgggtgacagagggagactccatctcaaaaaaaaaaaaaaaaaaagatatgcaaatgataaagtatatgaaaacatcttcagtgtcactaatcattagggaaatgcaaattaaaaccatggtgagatactacttcacacccattagaatggctactataaaaaaaataacaagtgttcacaaagatagggagacattggaacccttgtgcattgctggtgggaaaataaaatgatggtacggctgctgtgaaaaacagtgtgctgattcctccaaagttaaacatagaattactgtatgatccagcaattccgtttctgggtatatgtccaaaagaattgaaaacaggactcaaacaggtatttagacacccatgttcatagcagcactattcataagaggcaaaagaaggaaacaacccaagtgtctgttgatggacaaatggataaaaagtatagtgtgtacatatactgcggaatattatttatgccttaacaaacatgctgcaggctgggcgcagggctcacgtctgtaatcccagcactttctgaggccgaggtgggtgaatcatgaggtcaggagttcgagaccagcctggccaacatggtgaaaccccatctctactaaaaatacaaaaaattagttgggcataatggtgggtgcctgtagtcccagctactcaggaggtggaggctgaggcaggagaatctcttgaacccagggggtggaggttgcagtgagccgagattgcaccactgcactccaatgctggcggcagagtcagattccatcttaaaacaaaacaaaacaaaaaaaacatgctgcagcatggctgaaccttgaggacattgtgctaagtgaaatcagccagttacaaaagaataaatactgtatgattccactcacatgagatccgtagagtagtcaaattcatagagacagaaagtagagtagtcattgccaggggctgtgggggaagagagtatttaatgggttcagagatacatttgggagagatgaaaaagttctgaagatggatggtggtgataattacataacagtgtgaatgtacttaatcccactgactcatacacctaaaaataattaaaatggaggtgggtgcagtggcacatacctgtaatctcaagctactcaggaagccaagatgggaagatcacttgaggccaagagtctgagaccagcctgggcaacataaccagaccccatcttataaattttaaaaagtagtcaaagtagtagacattatatatgtatatataaaatatatcacatatattatataatatatatcatttataatatataaacatacatgtttaaatatgcaatatataaacatacatgtttaaatatgcaatatataaacatacatgtttaaatatgcaatatataaacatgtataatatatatatataaatatatatattttaccacacacacaaaattaagtgatgtgctgtaggttaagggcatgtttcaaatgctggtatcatggttgataaatttgcattccactttccagcccaaaccagttcttcttgacttttttttttttttttttttttgagacagactcttgctctatctcccagactcttgctctgtctcccagactggagtgcagtggcataatctcggctcactgcagtcttcgcctcccgggttcaagcgattcttgtgcctcagcctctcaagcagctgggattacaagtgtgcaccaccatgcccggctaatttttatatttttagtagggacagggttttgccatgttggccaggctggtctcaaactcctgacctcaagtgattcacccatctcggcctcccagagtgctgggattacaggcgtgagccactgcccccggcctctccttgatgttttaggtgggaatgttttggctggttgggatgggctagttctgctaaggtgcttcagtcccttttctggccatttgttttgggaattcactgggtgacacaggaaagaaagccaccttggactccagggtgactccagggccagagcggtgccatgtttagtaggtcagtgccacaggtaggggacaggcggctgaagtcttgcatacagtttgtgaccaggcaaaggattacagcctcactccttaatgtatatgtttttcacgtttactcacagtgagaataccttgtacatttggctttgtacttttactctttgtgatataaatttttcatctgtaattctttaactgccaagttttgagttaaacctactggaaatatttggcagcagaacacattagattcttgtattcctcagtgaaaataaaaaagaagcactacgggtgctccttgcgatcttgcctttcctttgtgatggctcctgtgcgggcagtccatgtggcccgagtgtctgtggtgcacagcacatcagaggtggatgtttacctgctcagggaggccctggacctttaggagtttaaagcaggtgtgatacaatcatgtgtaattaataaaagtatagaagcttattgttggcaaggacccattaccttgttcctcatgtatctgagactaagtaaaacactttcagaataggattgttgatcatgggggaagggaaattgcaattattttgtttgtagaatggcgtaggatttcaggagatgatggaggaaatagggacgggatggctgacttccttatctgaaacgtggtcactgattttgaaatacttagtggtcctctatcactaatttcaaaagttgaaagtaagtttatttacattgtgggatggaggccagggacaggagagtatgaaaatgtaaagaaagataaacaacagtctgggtatggtggctcacacctgtaatcctaacactttgggatgctgaggcgggtggatcccttgaacccaggagtttaagaccagcttgggcaacatggcgaaactctgtctctgctaaaactagacaaattagccaggcgtggtggtgtgcacctctagtcccagctacttgggaggctgaggtaggagaatcacctgagcctaggaggtggaggctgcagtgagccgagatttcgtcactgcactccagcctgggtgtcggatagagaccatatctaaaaaaaaaaaaaaaaaaaaaaaaaatagagaaagcaggttgctaacatattcagagctaaaatatggttatcacttttgaaatattaagttctcctcaatcaataagtttaatttccaaagaggaaagtaagttcatttttataaaatcatgttttttcactcattgaaaataataagtttgaaagtagacctctatattctttagcatgtgtttcagagatgaaacatgttttaagatgtggtcattatgtgcatttatttcataatatgatgactttaaactgtctctttactcttaattagtccaggcataaaattgcaacctacgaccgggtgtggtggctcacgcctgtaatctcagcattttgggagtctgaagcaggtggatcccttgagctcaggagctcaagaccagcctggccaacatggcaaaaccctgtccctgctaaaaatacaaaaattagccaagcagaaggatcacttgaaccctgaaggttgaggctgcaatgagccgtgattgcaccactgcactgcagcctgatgacagagtgagaacctgtctttaaaaaaaaaaaaaattacaacctaccaattttgttttctctacctggatgtcaatctcagtgtcgtgttactattgattttgagatggcaggatggtctggatgtttttcttgagcctagaaaacggaacccccttgaacaattatcatgaaggctaagggggaaaaacctattagcctgggagtgttggttttggggtcacggtggtgacacgtgtctatgatgtgagggaggcaggtgaggtgaggggcacaggacatggtcacgggctgggatggagtttgtcaccgtcatgcggagttcattcctttttttaaactgaagaagagctcagctacactgatttctccatcttgtattctaagacttcactagtgattacatttttctgaagtactagtgtttttatgctcatggaactgggctaatagtattaaagtaagtgttctccatgaacttcagtatatttgcatttttaaatgaactaccatatcagtctataaaacaggttacatacaaggccatagggtcaccagctgtgtttttcgcatcttttatcatccacgtaacacattcaaggacaattgtatctaatatcaccaccatgctcctctcctacttcaagggagataaacattcattgttttaaaatgtttaacaaatgaccaaactgcttcctgaatccaagggacaaggccacagttttctgggttatgatagttgcttctttttttgttttttggagactctttaaaaatgatgtcacgattactgacatgcatgtcaccccattccgtagtaattagaaaaggttagcttagtcacttgtgcttcatttgctgtcagaattccaccaaccactgaagattcttacaggttaaaacctaagatcctagtaaaaaatgcagcacatttgtaagagtgtagcccagagttattatttatttttacctacaagccatagaaagagtaacccagtaaatgatgtttctacttccagtattgtgcctggtctgtttctggcccaggccctgtcctaagagccaggcctgagaaaagaagggacaacttaatgaccctgtctgccccttcccaagatggtccctaaagtagcagaaactgtgaggggtgcagcagagccatcttgaacaggcgcatttgtgagacggcattactcagcgaaacgcagagtgttttgccatttacttagttttgaactgggtcagaggccatccctcctgtcctccactttgcatgggtaacgggcttttataggagcccctcccctcacagtggttgttcctcagcttgcctaagtgatgcacggagtgatgcctggacaggtggaaagagccagggagtggaggaccaggaagcccacctggtggttggccccgtttatggggcacctccccgcgtgccgggataattcacctcccttgcaacacacacaccccattgagggctatgaaagcaaaaggcagctttagacagaaagattattccaccaggccaggcatggcagctcactcctgtaatcccagcactttgagaggccgaggcgggaggactgcctgagcccaggagtttgagactagcctgagcaacatagtgagacccctatctctacagaaaatttaaaaattagctggacctgatggtgcatgcctgtagtctcagctactcaggaagccaaggtgggagggtcacttgagcctgggagttcaaggctgcagtgagcacagatcgcgctacttacttcaatctgaatgacagagtgagactgtctcaaaaaaaaaaatgaaaaaagaaaagaaagattattccacctaattgttgtaaaaattaaggataagaaaccaaatatgaatttactccatgaaacaaaatcgacacttggttccatagacggccagttaggggaagagggcctaggcaaggagagagagaggaagagaacattggagagaggtgaaggtgagggctgtgggaggaaccaacacagaagagtccaagccggatgcatgcgcatgactatgtctacacacacatggatgaatggagaaatagcccagagaaatacatagagcagaagccagcagtgcagactgcgtgtgtgataagctcatggaggctttttggggagcagtatcaattgctgccaagggtttttgctataacctataaagccattttgcatctttcttacctactgctataaatggaggggtcatgtctagtgctggccttccaaagatgaaattaaagtgtcttaactatctcgcttgctcttatctttcagtaaatccattgtcttctcatcgtaaaatgggggtaattacgtcttctttgcttctttgaaaatataattatagttagatgggaaagcaatttgaaaatctaagatttgtaagtgaatgtaacatgttattcctttggcgttaaaaataccaccccctcccacaagaaaaaatgtcattaaggctcaaacttatctctttctgcatatgtaaatatttccttgttcctgctttcaactcctcaaaatatggtcattcatctgggatcctatgcgttcccctcacccacttaaaatcctaggacagatagttgtaacacataaaaacaggcctatgcagggtatttttggttatgacacattaattttcatttaagggacattgggtaatgagatatagttctgggatagtgagatgctacttttttgacttcttaagttgtaaggcctaaaatttcattttttaagaattgaagcacaagactgataccctaggatactgttaagtgttgttatctaacccgggagttttagatatttgtgatattgtctgattacagacctttttcacattatacaatgggtttttctgatgtcttgaaatatattcacgtcactcatccatacttcagaatcaatacctcacactcatcctcttaattgatatgtgacatatgttactacgttacggctcttttaaatcatcttactttacagtcctctctcattttcttttatgcatgtgaacatatgattctggggtctgtaggttttaccagattgcccagggcacaggttaccagagcctctgataactgtcattccctgtcccctccctccagcagttctacatctaagggaaggaacatctgcaaagttctgttttccttctgtaaaagtacatgctaagtatgcaggctttccagaggagaggcagaggttttgaagccagacagactgggttgtgaaataggcccttcccttttctggctctattaacgtgagcaaatcatttcatttattttagccctggtgtcttaatcagtaaaattctgtgaagagtacctgtctcacagggtggctgtgaagattaagcaaggtaaaatgtgcctggcataggtctggcacctcgtaggcattcaaaaattgcagttttcattgcagtcctctgtggcatcaactgccaaggtgtattccttctcaccttgacccctgtatgtgaattcttttggtagccaggatgttggtaccctaggagaaaactggggggttagcttattgtatttatatacatcttcaaaaaacttttggtatgcccagagtccctatgctttaattttcttctgaattaccttgctgtatgagtttcccagggttgctgtaacaaatcaccacaaactaggtggcttaaaacagtggacatctgttctctcaccattctggaggccagaagtttgagatcaaagtgttgccaagtccacaatcactccaaggtgcgaagggggcttcttagcctcttccagcttgcagtggcaactggccttccttggtgcccttggcctgtggatgcatcactccagtctctgcctctgtcctcccatgacttcctccctttcgtgtttgtctgtgtccaaatttccctctgcatcataaggacaccagccactggattacggcccacctaacccaggttgacctcattttaactttattatatctgcaaagatctaatctctaaataaaatctcacaggtactgggacacttgctatttgactatacttcctttaggttaggcctctgaatggatataagagaaatcaagttattttgtctgaatctttcatttttcctctggttaatagtttgctttcactgtggtttcagaaaacattttaaaatgtctcactggaggtaacatagcctatattggctttttacttttgcagagtaaaatatgaaatcttataggaagaaaacatttaatactaagcaaagcactttaaaatgtatgcggagtggccaggcactgtggttcacacctgtaatctgagccctttgtaatctcagccaaggcaggtgaattgcttgagcccaggagtttgagaccagcctgggcaatgtggtgaatccctggctgtacaaaaaataaataaattagctggtgtggtggtatgcacctgtagtcccagcttcctgggaagctgacacgggaggatcacctgagcccaggaggtggaggctgcagtgagctgtgattgtaccactgcctgggcaacagagtgagactgtcgcaaaataaataaataaaataaaatatatgcagagaagcaagagttaaaagggcagcaattccactgaaaagtctgtttacagaggtttatgacttgggtctgaattgcccattttggagctgatagagctctggctggattgtttggactagggcagagctctggcatggccgtgggagagggcaggtctctatgatggtgttttaaagtcaagaaagactctttagaggacatggctatgcccagctgcatgtttctttggtgcatccgtgggccccggcagcccacgccggagtctgagttaggctctcacttgtttgagaaggttgtttgatgggacatgtgtgtctacagttccaagtagaatcgcaaccaaactacattccctggaatgaacctgggtggtatttcagaagtacataaactttgcttaaaaaaaaaaaaagattccattttagaatatccatcaaagttcaaatttgtttcataaggaatttaaccgtcttttggcgaataatcaatgtttgaatgtgagcttaaatctgagagttttcctctatccttctctttgtacttttgctgggagtaaaatggacatttcaattttgtatattatactgtaactaagttttgctatttttagaatatgtggtaccttttagagggaatgttttctccttttatatcttcattggaactgtataaatactgaacgtagaattacagttgtttcttttttttttttttttttttttttagacaacaggtcttgctttgttgcccaggctggattgcagtagtgcaatcatggctcactgcagcctccacctcctaggctcaagcaatcctcctgcctcggcctcccaagtagctgggacgacaggcacataaaaccgtgccctgctattatttatttatttttagatgaagtttcactgtgttgcccacgctggtcttgaattcctgggctcaagcaatcctcctgcctgagcctcccaaagtgctgggattagcggtgtgaaccactgtgctccggccaacagttggttttgtgtgctctactgtgctgactctgaggcatgatgtattaaaagaatgatcccgagtcctgcccgctgctgtctactgacctgcttggagctcacctgcctgtacccagcatctgtcactgcctggagtagttccttacttttggcattactgagaaaaggcagggtgcgtgtcacgtaagtgtaaaaccaaaacaaaccagaccccaaaaaactaactaaaaatagaacagaacaaagggctgcacgtccatttgtgagcaggtggacagttccctgcctgtggtcttcttgtacttctgtttttctagcgtgttgttcctgaacctttttattacagggcaataatgtaattgggtttattctcactatgtacttaagttgtctgtgccatttgattcggtaatttaaactatctttgtttttcatgtgtaatagagaaaataatattaaccttttcatgatttctctcatattttcctgtagtggtgttggggaggaaaaaaacgtttcctctacactctttgactctgttcttaagtcctgtgaattttaaggcctgtgaattaaattgacagaagacagattagcaaaagaaaagacatgtttattcacatgcctgcgtttgtgcgtgtctctgtgtgtgagagacagagttcatagaaaaatgtgactcaggccgggtgtggtggctcacgcctgtaatcccagcactttgggaagctgcagtgggtggatcatgaggtcaggagttcgagaccattctggccaacatggtgaaaccgtgtctctgctaaaaaatgtatatctaaattagctgggcgtggtggtaggtgcctgtaatcccagctactcaagaggctgagacaggataatcacttgaacctgggaggtggaggttgcggtgagccgagatcacaccactgcactccagcctggtgacagagtacgactccatctcaaaaaaaaaaagtgactcaaggaggtggttagaatttaagcagtatgtggcatcttactaggccgggagaagagaacttaagggaaaacaagtgacttttaggaaagataaataggctttcaggaaaatacgtgagttttgtgacagtgtctgtttgggtgtggattcccctctttaccctggtagcaggcaactcccaggaggggatttgtgacagttcagttcttttgagaggctctgcttttaggcagataacagaggtcactctctaaagccttcagctcaaaatcatttgtatgctattctgggtgccgtcagtggagagagaattaaaggtggcagcccagcaggagggatctgtggacagcagcaaaggggaagttgctggaacctgcacgggattgtcttttgagcagaggtgacgtggcattgcaggaaaacttttggaaaagaactcacgaagcccattgttttgtgtctttgttgccactgattaactgtgtggccctgggcaagtcacgtcacttctttaggtcccagttttcctgatttgaaaaatgagtggttggagtaaagtatctataaaccccacactgtgctctttgctccacattcactttttttttttttttttttgagacagagtctccttctgtcacccgggctggagtgcagtggtgcaatttcagcccactgcaacttccacctcccgtgttcaagtgactctcctgccgcctcagccccccaagtagctgggattacaggcacctgtcaccacacctggctaatttttttgtattttagtagagacagggtttcaccatgttggccagctggtctcaaactcctgatctcaagtgatctgcccatcttggcctcccaaagtgctgggattacggacgtgagccacccgcccgggctctgcatccacttcttcatggcacgtggcctcagtgagcattcagaccctcaggctggaaatggcgagcctggggcccggggtctcttgtcactggctggaggtgtgcctcctttgcctctaccagccaccattttggtttctcaaggagggagccggtgggctgcggcacaagctctgtgagctcccagggactcctgcagtcatagtctgccttctctggtggttctggttgtcctccctgggcccatggcctgactgacagccctttttgtttatatctgtaggtaaggttcaggggtggaagacggagggcatgcaggcagggcttacaggcctccactcctgcaggtctctgacgcagccctcctctctggccaggctttgaggggtctgctcagacaactgctctctcatcaggcctgatccctgggaatggttactccatggcccagctttttcagagcagcaaagaactcctgccataagagctgtctcaccattgttgcgtctcatccttctaaggacctgctgtttcccagggaatggctgcagagccagatcacagaagttaggtgacttgcctgagattgcactaggtcttgggccagacacagtgactgaacatgtctgctcgattcccagcatcatgtgcttttctggtacattgtgttgcctctgaaaaattatctgaaaaaattagaaggtgatgcctcatttaggatcatagactcttgagctgtgggattgtccagtccaaaatctgagatccagaaaggtcagttgtgacttgtcccagctcacaccactagtgagtagcctagtctagttctttgaatcctcgttcagtgctcgccccatcagactgctgcctggaggctgttggtgggagccagaggctgctcgagtgttgggtcctgacagccctggacttagtcctcttaaagcaccttctatttttaagtagtgcacgttattgaaagaagtgggtagaacagcagtggatggcattacccattcatttcttctcctggcaggtctttgggggacacctatgatagttataaagttcattttactaattcacgatggtgctgattttcttttttttttttttgagaaagagccgtgctctttcacccaggctggagtgtggtggtgcaactgcaacttttgcctcccaggatcaagcaattctcctgtctcagcctcccaagtaggtgggactacagacacgcgccaccgcgccccgctaatttttatatttttggtagagatggggtttctgcatgttgcccaggctggtcttgaactcctgacctcaagtgatctgcctgcctcggcctcccagagtgctaggattacaggcatgagccaccgcatccggccagtgctgattttcttaatgccttttatcatagctcatcattggtcaccaaaccactatttcaattatggttattgaaatatcagcctagaatcagcctattgaatcagcctataagaatagatttggttattttgattaaggtttggttgtgtcttcatgttctagtacacaaataactgttttaataaacaagtaaatcaagaaaacccgaggcacggctgtggtggtgagagggaatgtatggcttgttctttctttaataccttcctggatattgagctcacctgacctgttcgcatttgaaaggtcgtccctgatggcccctggaggcgaagctcatcacaggatgaggaaaggacagaggcacagagaacccccaagaggagatggggctctgggagacggccaaggcctcggccattctctgactacggccagctggccagccgcagtttgtctattcctgaagactcggttgctgcagacccccagaaggaagaccgtgtggacgaggacccccaggcaagcatgacttctgccagccctgaagaccagaatgctccagtgggctgccccaaaggagcccggagaaggcgccccatttccgtgataggtggggtcagcttgtatgggaccaaccagacggaggaactggacaatcttctgacccaagtaagatctggtgtgcacttccccaagccagcagaggccctccagcttcctgcctctattctgtctgcacactaaactggatctgctttttctctcccgttctcaagggcggcaccatgtacttaaccaccttttcttcctgactgtgtgaaaacatgcatgaattcaaactaaccacctgacgtttggatgccttttgctaatctttctttcctgggatctcaaataatacatgagactcatttgctgtttgtttctgaataacctgagattctaaccagggaaaggtagcagggcatatttagtaagactcctgaaagaagtaattgttgaaaaagacagtattgttcattgttaaaatgtaaagataaaatgtaaagaagaaataaataaaatgtaaagaagaaatagttttttaggagatgagaaagtattttgttttccaccattttcttattttttttttgagttgcaactttgcaactattaatagtttgacaatggattaaacacttagtactggtttcttagtatagtttagtaattcaacaaatatttatccgggtatccagtgagcactttgaaaatacaaaacatttaattaaagaccctatcttggagaagtgtatacttatttgtggaggctaataccttggccatggtaaacattcacagaacaatatatgagtaatatatatgcccactttcatttttaaaacctggtagctgatgtcgtaagtaacccataaaattatcttaaaagggaactcctatggagtactagtactggattgtatacgtctacatttttcctgtaaagccccacacaatgccttgtctataacaagcactcaaaaactcttgcttaaataaattgaattgatttcttaaggttaaaaaattaagttgcagaatatcatgaaaatgttaagaaccttttgtctgaaggtgctccgctgttgggaaatgattctgtactgaagcaaattgtcacgcattttaactcagaacaatagtccaggatgctccacagccttagaaagggtttcacttcagagcagccaaaaggaatgtgcgaagtaattttctgtactataacctaatgtagggaattgagtgggaaaattgtaagaaaacctaaggaattacataagcaggatatgcatgtaataaacaaaagaagaaaaaaagaaatctaaggaacgtataaagcaactgggcctttgattaatagttttagggatcgctattatagaaaaccagaagggcattataagagagacctgggcaactacatggaaaaccacttctttcaactaaagctccactgccgtgtgagtttgggtaagcaaggcttgccttcagctccacaaatccttactgagggctcatctatgccaggctctgtgtcggtggggaggagtaaatgaggctgaagaaggatgtgaggatcacagatggccaccctggccgggtttgtggccttgtcctggcttcctccagaggccacccctgggaaagcatcttcttacccttgtgaccctgcatctgtgtgacaactccactgcttcctaaatgtgccttcatcttctcagaagcttctttttccttagtgtgacctattggcatgttgcagacaagtgagatgaaacatgaggctgcagggtgcgggccagtaagctgatcaggattgttaaaaactgtagcatcatgagttgccactgggcttcggtgcagcctgcaactcgtggcaggattggagaaaccatttcacgtctgtgagtggcttcgaggtgagagcgctatgcgtgtgaggtgcttgcaagagctgccacttcctggtacctcctcacagattttgctttctttttgcagccggcttccaggccgcccatgcctgctcaccaggtgccaccctacaaggctgtgtcggcccggttccggcccttcacattctcccagagcacccccattgggttggaccgtgtgggacgccggcggcagatgagagcatccaacggtgagtctcagagtccctttcctttcagagctgctatgggcccatctgaccgtttccagctaacctgaggcagcaggttctgcaccttcgcgcctcccttgggccagggcgcgtttgtctgggagtgaggacggctcatctcaggagaatggtgcatcatttgctgtctggggtagatgctctgtgtgccaggctggtggctctaagtttgagaagtttgcccctcctgtggtgtccgtgtacatacattcctgcatgtggagatccctaaagaaccgagacccaggctagaaatccgagatcaacacgtcagcagggtcagtttcttctgagggctgtgagggagggtctgctccaggctgctttccttgcgtctggtgccctcagtgttccttggcctgtaggagcattgcctcatctctgccttcatgttcacatggcattctcccctgtgtctgtctgtgttcagatttcccctttttataaagacaccaggcttactgcatgtgggcccaacttagtgacctcatcttaatgtgattatctacctaagactatttccaaataaggtcacactcatgggtactgggggttaggacttcaccatcttttggggggacacaattcaatcaaaaacgtataccatgtttgtaacaatatgcaacgtgtacccatatggcagaagattttgaaagaacaggcagaaataacagtagcattgttagggtggtaggaatgtagagcacttctcctcccaccccgtacctgtgtacacacagcctttccctgctttctgtaacactggtttttgttgttatgttaaaaatgttttaattttagcgttcttttgtcgaaaagcaacaaaacctaactctggctgtcttaagcaaaaagggaatttattggaagggggccaggtgtgcccagaattgatgggatggctggggaaccaggctagggaagggatggcatccaggctcactcctgggagtggaggagccaccggaaggtgtgtgatgggagactggccatggcactgtcccaggagctagtgaggtatccagtgagcactttatctgggtatccagtgagcgctttgaaaatacaaaacatttaattaaagaccctatcttgaagaagtgtatacttatttggggaggagttataataaggagttaacttattaggagttagtgactgtctttctgtcactcacccaggggttcaggtcccaggatggaagattcagctgtccgagcttaggtgatatgtccaccacctggtggtactggaacaggaagaagggtggggtgtctgtctccagggacccttgccttctatatgtgaagacaggccaagtaagtatttaacagagcagacagtactataaagaaaaataaaacaggatagagagcattcatttccaaagagtgttattctaatgacactctaatgaacaggatgcacctgttccatgaaccctctctctcttccctagaaggagacacccagatcctcatcagtggcagcagacacctccaagtctaggacctcttaggataactagtcctccagttccatgcagtgcctcttcagcgttgattaactagaggcagatttaagcaacacatccctaccagaatggcaaggcagggaaaggaaggaaatagagaatttgggatgctgtggagaataaaacgtcatgcaaagtttacatttcagcatttgaacagattccataagtcaatatgtaggatgcaccaaggcaccagtgacggccctgcagaagatgactttgggtaatgtgaggagtaggagcaggtgggggagatagcctcctctccaaggaggtgacgctggggacaggtgagtaggaggcagtgaggcagagatccgagggaggagaagtcctagccgaaggagcaccagaagcccaaagacaggcaggaaacatgatgtgtctgaggttcagcaaggaggccacagtgacaggagctcagggagcaagaggcagacgaggatgttgcaggctgggaggtgggctgaggctggaaagggctctgcaggtcatgaggaggctgagcttgttctaagtgtggtgtgaagccattggcagcaggagcatattatgttccggtttatgcttagagagggagggcagtttgtggggggaaaggaagaggaatggagattgatttgaaggcgattgcattagtccatttgagaaatatggtagcagtgaccacaaaagccatccccattttccgtgggtgctcattttcccagtggtacgaagaggcaaaaatggccagccttggttctgattcactgtggccaggactgtgaactctggaggaagtacttctcccttgggcactaaattcagtttcaacagagcagagttcctaggtgggaagaaaacattttgcaagtatattattaagtaatcctaagaagccgcttctatgtttacccttggtttccggccctgcatcttctgctgtgggccagcctctccaaattagtcactgcttcagagcttgcgtcccatccagggcagtatggcaacttctgggtgtgtctcccagctgcctctgtaacttcatttttatttggttgttattgggtgtgatggggtcatgtgcttccttctctgtgacgttctgggcctggatggcgtgtgagatgctgcgacaggataggggccttctagaggatccacagagtgcaggaaaacaaatccaagcccagcataagtggcccttccagtagggacaaatcaccaccccctctattatgaaaaggccccactgcaatcagctttccgcaaggggctgtctggttcctgcggggaaccgtatcatcagctttgttgaggggaaggcccagacttcctgtggtttagcccaggcttggcatccatttttgccaccatggcctttttcttgcttgcttctttttttttttcctttttatgaacccactgagcaagtatcaagatgactaggaaggaagactggcatctagctgcacattgggacagcatgtccacatgatgattgattagcctctcttgcaataaggattcatgtaggatggacatcatctcatgctctgcgggtattctgaggtagccagttatactccttccccaaacccatcctcagcccatcttgttctttccacattcctccaggccattcagccaggccattagctcctaaccaggagtgcgcacgagctaaatccttgccttgccaaagccatctctcctactcagaaaggcttgggaagagtattgcttacatttgccgccgggagtttccctgtcctgaggacacagtcaccaggctgatggtaggagttctctttgagaagctaggaagaagacttgtagtaggatgcctaccctgaggctccctggctctgctccatcaagaggcctgagtctgggagttgagtgagggccctcccttgtcttctctgtcatggtggctcaggtcgggctctgcttgccagccctggagagttcctcctacacaatgttgtggtacctttgtggaatcactcatctgttttgttcctggggaccccgagatcagttaacagcacaaccagagatttcacaggtcaaaccattcagatgaccaagctggccctgctgtgtggtatagtaactatgcccacctttttcccatgacagatgtcccacccccatggaggaccaggtttgcattgcagtggaaccatctctcagcagcatctctggcctagagagattagcagtacattaattataaaagctgctgtcacatgggagatgcagcccaaggggtggtgagactcacatgatagaccatctctagcatttccatcccagtcctggaactccttcctttctatgcactgagggttttaggtttatataccaacgaagtgctagaatggcatccagctcagtaagcccacaaattgagctcagcaaaccagctgtaaaagcatcattttgagacacgttggggagattttcagatgaactgaatatttggcaacatgaaggaattatttttaattttgttagttgggataagatagtgcagttatttttaagtccttgtttgttatacacagatagtgaaatactttctgcataaaatatgatatgtgagatttgttttaaaatactccaaaaaagttggtgggaaatagttgaaacaatattggcaaaagactgataatcgtgggttcatggtattatctgcttttgtgtgtatttgaaattttctgtagtatcaacttttaaataataatgaaagtatatttctcctccctggtcaagtattctcaaaatcttgataaccaaaggttggtaaatggatataaaaatagagctagacaggaagaataagtcctactgtgccacagttaatgacaatgtattgtatagttcaaaatagctagaagagaggattcaaatgttcttaatacaaataaatgataagtgcttggggtgatgatatgctaattaccctgatttgctcattccacattgtatacatatattgaaatatcacactgtaccccataaatattgtacaattattatgtgagtttaaaataataatataaaaaactctccaaattaagtagtatccacaactaaatttttctcaaaatatagaaaattgaacattgcatttaatttttttttttttaaagaaatgaaggcagagtctttctaggtgaatggagccctcccttccgagaacttggcagcgccgtgctgtgctcttcctttctctcaccacttttctctggccctgtttgtagcacctgtcttacctcttgccagccacacagcctgcgaaggcaggtcatgtgggacaggcctgagtcatgtttgtaggctactgggtgtgttatttgggataatagagttgggataatgaatttcagtggcacttattggagccttatcggagggaagagtgacaacctgtaaacaccactgcattgttggggatggtgtttgtggcttcaccttccttgggtttcaggaaggatgcccacactgctagaagattttcctggggaattatctttgccgcctttgctttgctttcagtgaagcttttctctttcatttgagacaacttactccatcacagcctacctaagctcctaatttttttgtacttaacattgggttccaaccatacttcttcctttaaccggtctgtttatgttgatcagaagtcaaattcgagtgcttttcagaattcttactttgaatttccctttgtctctattatccattccccttctctttctacgtatcttgtccagagttcagattagcttgcttttcttatcttccagagaggagagtgtccagtttacttcgctgttagacttgagtgggaacttcacagagacaagcaaaggacgaatgcacacccgtgcaccaaagtcagtcgatatgggtagacccctttcaaaaaaagatacctggtctgttacatttcttgaaagccctttagttaaccagtaagtacaccgtattagagcatttagtaatactgccagataataaaagaggaaagtcaagatgaggtacaataatagctagatataaaaactagagaaaatgccctttttgaggggacacaaacttggcaagttgacttgctttaaaaaatgtttctaacttactgaagtaattgctcaatttgattttttaaatttttactttttttttttttggcaaatatagttctttttttgcaagctagaaaagagaagcaaattgacccagtctagcactctagtgagctaggctgagtcactcattctttatcagagtgatacagtaatacgaattgctagcaggcaggttgtaaaactaaatcataaccacctatccacatttttcattaggaaacaaccaaaaattgagtcctttaaaggcaggttataaataaataacatcttgatctgtgaaggggacagcatgacccaaattttatgccaaccagcctgtctgagaagcccatctgagctggccagtgagtggtgaagagaggagtgcttttgaaaacgtgctctgaaacgataagaattctggattctgggcaggtgtggtggatcacctgaggttaggagttcaaaactagcctaaccaacatggtgaaacctcatctctttctctactaaaaatacaaaattagctgggtgtggtggcgcatgcctgtaatcccagctacctgggaggctgaggcaggagaattgcttgaacacggaagatagaggttgcagtgagcctacattgcgccatggcactccagcctgggcaacaagagtgaaactctatctcaaaaaaaaaaaaataaaaagaactctggattctgcctgtcaataagaaagcaagtaaaaagtgtcacagatgtgtgaaattggtccttgtttataccggagtttaccatgagaatgaagagttcatctcaaaaaaaaaaaaaaaaaaaaggccaggcacggtggctcatgtctgtaatcccagcactttgggaggctgaggtcggcagatcacttgagcccacaagtttgagaccagcctggccaacatggcaaaaccccatctctactaaaaatacaaaaaaattagccaagagttgtcgtgcgttcctgtagtaccagctactcaggaggctgagatgggaggattgcttgagcctgggaggcagaggttgcagcgggccaagatcgcaccactgcacccagcctgggcaacagagtgagacctcctctccgctaaaaaaaaagagagactgaaaagttagagatatgagtgaggaataagatacttaaattttgaaaataaatgtcttagtgataaatccagcatgctacatttccccttttaccacaagaacaaacaaaggactattttaaaagaaatgctgagttctaaacagaacactttctaccacagaaacaggtcctcttccccgtacgatcaaggttactgctcttccactactcaggtccacgtcaggagctttgtcagggcaggaaattcataaaaggagagcatatcctagctagccactggggagcaaggttagcatccttggggtggaccatccatatgggtaagctgtagttttgataagaatctgcaggctgcccgtgagcatctcgtctcatgcctggccttgtgcactctgagctgggtgctgggcctcccaagaacccctggggcccaacaggcacgtgcaagtgaccctgcaggaatgctgctacctccttgctaagcccaagagaacggggaagaccacagctcccaaaggtcttagggagtcttatgggggctcttcttgtgaacagatcagtgcatctttctgctgctgtctgcagggagggggcagagcaaggggcttccacccacgtggccgccaagtggagccatccccacctgccatccccaaaacagcccccagagcctcacttgctttcttactctggtagatgttttctgcacaggattgaggctggtctgaataaagaaaaaacaaaaacgtaccaagacattttccagtgagtttaaggctcagtggtttcaaagtacaattggggattatcattcagggggtgacattctttccctgtctactgctctggttttttctgtttgattttgtactgaatgtatacatccccttagaaatggaaaagatttacttatttatgtatttatttacttttctctatttagggattagtattggttgtaaaacctcatcagctcaacattatgatactttgatgagcttaaaattattgggaaatgctataggaggggccagcagggcttaatcaaccagtattgtctcaggaaatgtccagggtgctccgaaacctttctgaattggattttattttattgtattattattattattttagattttctttagagacagagtctcactctgttgcccagactggtctcaaactcctggcctcccaccttggctttacaaagtactgggattagaggtgtgagccaccacacccggcctgagttggattttaaatgtgcttttggttttgaagatacttccttgatttcgatccatttaacaaatacatatgtccctattataaatgaggcacagtaccagaggctgggcagttctgaggaagctagagagtgttcctacagagctgccagtgtggtggatgaatgggaaaaaccaccacaactgcactcacgctgagtagaaacggggagcatgtcagtcggatctgggctgtcccaagccctcatggaggaaatgacctcaaatgaggctttagggatgaagggagttagattaagtttgttgttaggggtagtgtgttccaggcaaaaagtggaggccagagaaaggagagcacatctgagaagttgagagtagggtagcctaagagaaaattacactggtcaggtcacagtgtcctccaggcctctgtaaggagctggcagatcccacagtgtggcctgcgcttgccttcctggctcctcttcactggtcccacaagtagagttgtatcctcaccgggagtcaagagcatgaccccaccaagcctgtttatggcagttgctttattatgatgatatggaactgatttagatattatgtaagcaaataaaatgtgaatatgagactgaaaggggacttggcatctctgacaatgaaatagaatactttggagaaacccaatgaaactcaataaaagtgaattgttaaagaaaattctatcaaattaggtgagaattgacagcttggaaaaaatggaaaaatcgaggagtctatattcagattgtttcgccagtgtctctggttttattgctcaacgttaaagaagccagaactggaaatcatagcggatgcatatgggtgtggattgtacaagagacaatgcagaattctagtcagttgatcgtacacagggagccttgtcctacatcatgacaaaggtgaatgattgcacctatgtatgccttaagttatgttcatggcatgcgtgcatggggcacttttttttggcttagggcttttaggcagcccgattgctacaagtcagaggacctcagctccaggtcaaggctatagcaggatgcagaggaggaggctgagaggtgggcctccactaagttcaggctgcctgggaggacagagcctgggcaactgggagccactgagggcttttgagggccatgagatgatcagatgtgcattcagagagatcattggctggatcgtggaggactggagacctcgggagtctgttgcctcggaaaatgatagtggcactggagatatgaagaaccgagaggtcgaggtaattgtctggatgtttggggccagggagcagccatccgtgctgcctctgatgcctggctgacaaggagcctaggagaagagcatgttggtcaattggggagcttactccattccaggcaggtcaagtcagagcgacctatgggcagctcgatgaagatgacatcaccatatccttgattgtgaagctctgattttgaggaaggggacccaaagttagagatgaagatttgggagtcatcagcaaagtggttcttaaaactctaggaaggagtgtgatatgagtgggggtaaaaatgagaagaggatcttgaaccatgctctgaggaccaacatttggggaccagtgaaggcagagaaattcacaaagaaaatagaaaaaaagtagccaggcaggtaagcggtgtcccagatgtcaaaggaagccagggcttccaggtgtgagagtggttcacactgtcaaatgcaccaaagtgtagagagaaaaatacccactggatccagtggcagggaggagcttcgtgcccttaaaaaaaaaaaccggtttcagttcagcagttcagtgctagggcagaatgccatgggaggatgttgggggagttgtcttaaaattgaggtattttatctattttgcttaagctgtgttgatggttttctcattttatagttcaaaataccccataaaggctcaggactaatgaaaaacaatttattaggctatgatattaacaattattttgtctatgtattaccagtatctgaaagcttgttagtatgaatgtgtcagcgtttattctcactgaatgtttttcaaagagatgggaagattacacatcagaaaattccgtttcttgatttagaattgatattaatccccaacatttaggaagtaggggaatttaatcataggaagtgcttatgttgtttcaaatttgattttttaaataaaattaattgaattatgagaaattactgaaacttatttctttgaaaagtcttgtagtaaagaaatttattcaaattctttgtattttttttgtttgtttaaaacaaagttttttttctttttttttttttagctcttttgtggttgttaaaatcctacttctaatttgttggaataacaaatttatgcactgatagtttgatcagatcacaccacgtttctgttttttcttaggactgtcaataaaataaggcagtaagaattcttgattcatagcctaagtgcatcacaaaagggaggttactcatacagttattctggccttattctgtcctaattattatgaaagttaattttcttattaacagacctttgggtcaaaaagtgagagtgtaatcccaatccttgggcaagtcacttaatctcaaagtcttcatgtctttatctgtaatgggagaaactaatatgatctgtcccacagatgtggaagaatgacctggcacacagtaagtgtgcagtaactattactaattaattagggaagcattaactatacaggggacaaaggcaatgatgagcaggaaactgtttacatccagagttctgagttactgatttaactgcactaatcagtgacttagcttagacaagtcatttagtctacttagtaaagtcccagagcacttggagtctatatggaataatatactgtttattatccaaatataagttaagcaaatttaaaatacatacgttcaggttattttaaaaaaaaagaaacttgactgggtcttttttatagattctctgggctgcaaattttaggtattatctaatgatttttcgttgtatcacccagagactccactgaattttttgttaaaaggaaggaaaaaaagaaaagccgtagcaggtgttgaggtgtgtgtgatacctttgaaatgactttaagcatcccataacatctttttgttctcttgttttttgaattatctcttgctgcttctgcattttactcaaatcgattttcaaatattttctttcaataaagaatcagagggaaaataggaacttgggatttacttgcttagtgcctgttgcgtgatagcagcggagctctcaggaaagctggttggagaattggtgatggagcacttggattgttaggtggggatgccgtgagccttgccacgttcccttctccccctacatctcactttatactcatgccaaggaatattggctgttgattatacagtcatccctggttgtctgagggggattggttccaggactcttcaggcatcagactccaaggctgtgcaaaagtccctgatataaaatggcctaataattgcatataacccatgcccatcctccatatactttaaatcacctctagattacttaaagacctaatattaatgcaatgtaaatgctatgtaaatagttgttatgctgcattgtttagggaatagttacaagaaaaaaagtctgtacatattcagtacagtcacagttttttaaatgttttcaatctgcagttggttgagtccacagatgtgtaacccacagatacggaggaccaactgtgtttacttacaaaacgagatgaatcaattcacttatcagtactcgcagcaagtgttttcctgactgctaagactgcctatggtaaaatccctgtcttctgactgctgtgagacagcctggattccacagagtccgaaggaatttagaaattatgaaaggcttctgtgtgcagaacaaggactacaaatatggcctttagtgcccaaaaccatattgtctgcaagtcttggagattgtattagctccatagcagttatcttagctgttgtttcatgcctcattgttgcctatcatcgagattttttagaaggaatatagtgttctatttcttgtctcagaaaaacataaagtattaaactttttttttagcaagctcatgaaatttcatcttctagcagttaaaacattctcagttctcaacagctagagttaaaaagtaaaagttattgaaaatatcgtctgtcttattactaagcttcagaaattggattttaaaagaagaagaaagaatattaaaagtcagaggaaggagagcaagacagctaaatgtctagcgaaccaccaccaagagccagtagcactctgtacgtattcctggcctgatcttacagacaaggtcaggccttagaaatattcggtaacttttcctagcttggctaagcaagatgtaatgagtagatagtggagctagcattcaaatgagatcaaactgaaaaacacagattgctttccattctattcagtttcccgtatgttttctccatcacaaaacacaatattgtctaattgatttgcacaaagatatgcctgttggcagttttaaagaccatgtcccaataattgccttctattaagacaaagaaaaaagttatattcctccaatccctgttgtgttcttgttatgtttgaaatgtgcttggtcctaaggatctgaaaataaccaggtaaatacagaaaagaagtgaaatctgtactaggccctgaaggatgaaaaatccacgtgtgcttacagagaacaggaaaacaatggccttcagctgaagctggcaccttttaaaggacaattttatatttatttctgcattaatcaaagttctagtcagtgcccaggtccaaagtatcttgtttggagctgtgtttggagagggtgggatattgagtaggggtgaatgatgaaggggttcattgaagccgctgagagcacatattcgctggttttgtgtgttcaggtccacattgctccaaggtgaaagcagttgctttgaaggcatgaagagaggcactttttcttcatagctgtcttgaagcaggccggggcgagtctcacagagtttgcccttgtacttcaggctccatttcctgagctgtgtatgatggggcccgcccctcctgtggtgaagagtctgtggctgctgagtggcatttcagtcagacctgaactgagcctgcctttgcccaacaggagtcggcctgctgaggcagcatctacccggctcatcagtttgtgctaggacatgccatgccctgtgttacgttcaatgcctttcaggttcctctggaaagtagcatcactgtgacctgtagattaataatcatgtttgtctttaatccatttagaatgaagaggtcactctcggcactcgatgatttaggggaatggacattggcctgaataactgatagcaaatgtagcaaattatttcctgtgaaggactctcccatcccaactttagaaagtgcagccccgtctcagctgtgggagatggccagtgatgtccacaggtcctggctgtgtcactcctgattctgtgtagtcattgtccatatgggagttgggattatgggtcattccagcccgtggcagccttggttcttggctgatgtgcccatccttccgcccatgtcctaaagctgatggccatgctttcccaggggacagcatgactctcccctggggcctgcctctctgcctagcacctgtcctgtagttcttggtaatggggccatatcaaagttagtggggacataaagttccaaggatgttcctgggttctggatatgtctgtaccatgaagggaggcagctgctttgcagaaacaacagggaagctgcagcaggtgggaaactttggtgctggtcatctctctgcacttaattcggaggtgatcatagaagaaaatatctaccatgtcatacttaaaataagaagatatcagaaatgtggagctcaaaggaaccttaatggccactcaatctcaagaaccttaatgaacctactcagtctccagaaatcctcctagagaggtcaagtgctgactactgttgtgagtttgagatactgctattaacttgcctctccaagaattttatgacatttctttcccataggtatgtaaatatatatgggttttgggaccagcttaccaaaaataactttctgtatctatagaataaaattgatcataacatcctatgtgttttcaacatctatttttaaaaattaattttaatttttatagagataatgtcttgctctgtcacccaggctggagggcactggcccaatcatagctcactgcagcctcgatctcctgggctcaagggattctctcaccttagcctcctgagcaactgggactcaaggcatgtgtcaccaagctgggctaatttttttattttttgtagagatggggtctgcctatgttgctctggctggtctcaaactcctagcctcaagtgatcctcccaccttggcctcccaaagtgctgggatcaaggcatgagccaccacacacaatcttcagtgtttattttgtcctctctgatttctcaacatttaatattaatatgtaagttggatatctccactcctacctacggatctgatccctgtgcttaatccttttacagtgttgccaataatcaatgatggtcatttcccagttccagtgaggtagtggtatcttatccaaagagaagagattaatttgggggttggatttttcttttttctttttttttttccaagtcagggcttccctctgtcacccaggctggtgtgcagtggtacaatctcagctctccgcagcctcaacctctcagtctcaagtgatccttcctcctcagcctcccaaagtgctgggattataggtgtgagccaccaatgcccagccaggattttaagacttctttgaactatggtttaggttttcgttgtaggattcttactgatctggtaaatgtaggctctgatcactaaaaaaaaaaattaagctgaaagtcctatctccttgttctatcatgcccctttctacattagtagtggcttcttccaaaactatcttagaagggtggctggcagatgtgcccatccttgagcccatttcctaaagttgatggtagtcctttgccacagaatagtgtgactctcttccctgggactcttccatctagcacctgtcctgtagtgcttggtaatggggccatatccaagctggtggggacataaaggggttgttgggtcacatcctttgagaagatgcctgatttcaaggcagtctttgtttatttacttgttttccttctttttattttgttttgcctacacaataatctctagtgaatgcctctggcttaagatcctgtaatcccaaggatgttagtctagtgccctgaccccgtctctggattgagaaaaagtgcttgggaaacagaaactatcctcttgtaccggatgccgatgaaaagtgaaagtgagcaaacagcctaccaagttctaagaaaatgaggccaagagagcttttgctttttgaaaactaatgattttaaccaaaaaaaaaatttttgtagaaaatgaaaacactggattttatttgcctccttctggaatttaggctttgttggaatggataaccttgagaattaattcctactttctgctgctttgtgtctgagtattatgcattttaccttttcattctgactaaactcaagcccacccattcattccatggtcttcactagttagaaaagatactgatattgaagattttgcctcatggcagtgcttctccaagtatgttgtatagtttcttgagttgtctagaacaacacttctgaaacctgaatgtgcatttgaataacctgggatgttgttaaaatgttgattctgattctgcagacctggggcagggcccaggaatctgaatttctcaccagctcccagtcatgctgatactgctggtccatgggccctactgtgagtagcaaggccagaggatactttcttttggtgtagtaatatgtgttgtcataaaaaaagagcgtcatagccaaatacgattgttaaattctatgttaaagaagatggcacagctgtcagtgggaactttttagagcctgtgattactgatgaatcctgtaggatatccaaaaggtagatacaatatacagtggttttcaaactcttttcttggagcgtattatgccactagtattccatgagatatacttaggagactttacacgagagagagagtagtctgctgtgaaaaacagtatcgaggagtcttttgagcctataatttaataaactaccacctttattgagaatatgcctgtattgaatgaattgtctattaaacatcttaagtatttgcctcttttaaatcatctttttaaattcctgtaagaggctgggcgcagtggctcatgcctgtagtcccagcactttgggaggccgaggtgggcagaccacctgaggtcaggagtttgagaccagcctgaccaacatggtgaaacctcatctctactacaaatacaaaaattagccgggcatggtggtgtgcgcctgtaatcccagctactcgggaggctgaggcaggagaatcacttgaacccaggaggtggaggttgcagtgagccaagatcgtgccactgcactccagcctgagtgacagagcaagactccatctcaaaatgaaataaaatttctgtaagagaaagattttcagctgaactggtcataagagtttgtgtgatcgtgtgtgtttttcacttgtagtgcgggttactaaggctatgagtttcccagaaaactgtccttacctggatttgagggtgggatgctccagatcaatagaaatagccacagatatttgaagataagagaagcctacgatatagtatatagtcaacatgtgtgttattactaatcatacagctttccattctgagttcatgctgtgatttctctgggaactagcatgttattaagggacctcaggttttttggagcgacagcagcagcgtgacggctaacatttattaacccccaatgaagagccagtgcttctctaaacactgcaatatgttctcgagtaattctgtgaggattattgattggtgctgcagttatccccactccgcagatgtggaaagagagctgcctagagacttggaaactttccctaattttgttatgggaaagcagcttttgaacacaggcagtctgactccaaagctcatcactataaagcatgcattttactaattggcactatcacttgtttaacatgtatgtatgtatgtgtgtatgtatgtatgtgtgtatgtatgtatgtatctattttagagacaggatctagctctgtaactcacaacactggagtgcagtggtgtgattatagtttactgcaacctcgaactcctgggctcaagtgatcctcccatctcagactcctgagtaactaggatgacaggcatgtgccactctgcccagctaattttttatttttatttttagagacaggatcttattctgtcaccgaggctggagtacagtggtacgatcatagcttactgcagcctccaccttctgggctcaagcaatcctcccacctcagcctcctgagtagctgggaccacaggcacatgccactatgcatggctaatataaatttttttttttttttttttttttttttagtagagacaggaccttgctatgttgcccaggcttgtctcaaactcctgggctcaattgatcctcccaccttggcctcccaaagtgttgggattacaggtgtgagctaccttgcccagacctaattttttttttttagagatagggtcttgctatgttgcccagactggtcatgaattcctggttttaagcaatcctcctgcgtcatcctcctgagtagttgggattacaggcatgagccagcgggcccagcttaaacccacatttactaagagatgactgtgaggtcactactttgcgtatatattacctcattgttcataaagttaaaaaggccgtgtcttctgcttatggggaaatggaaggaagctcactctttgttaacagtcattttacaatatgaaagacttgctcattgtagataatttggaaagtatagaagagtatagaggaaataaaaacaacccagaatatattacctggagagaacttacatgtatacctttacatgtatgcctttacatgtataccttttgaacaaaatcactcttttaaagtgatttcataaatttatagctaacttaatgtaatctcataactcaaatttttgtcataccacagtgtgaaatcctaactgtatttttgaactaagtgacccctgtgcttttctcttgtgaaataaataccttttgaaaagctctctgaaagtttaactcaggttttggttttgtagttaaaagcagcacacaccatttctcctaccttcactgaaggctctcggcagcacctgatggcttgtgagtgtgtttgtctttggtgtatataggttttgccttagtttagaattctctcctgaagtcccccgcaatgtcactgtagccactaacccttggtcacacggagtgtggagccagctgtcagtttctgggcaggctctggccgggaacgcatacaacgtcaaagcagtgaataagcgatttctgcagttcccgtagctgccagcctgtgcagtcctctgtgatgcttggggaccggctcctcggtcacaccccagtcctgctctgaaggttgccgttttccaaacagaaggatggtagctagaggggagatagcaagattctggagtctggaaagccttcacttgggtatgtgtgcaaagaatggattgttgtactgtgacatgttgccgattcagctctttccttcccaagttgcagttcttcccctctctctctctctctccactctctctcactctctctctctctctctcactctctctctctctctcactctctctctttctctgctgcttgtcaggtgtgagcctgtggggaaaagctcactcttctagtaaagggtgctgaggatagttttagttgtggacatagtcagttgaagaaattggttttgtttatggcacagttgcttgtttggagtagaaaatcataagaatcaagcctgaaccatccttcctgaggaaggggtctgggttttgctgctgatattgttactagttttgctgctgatattgttactggtttttgcttctattacatgaaattcctttattcaatagattattggtggtgtgtataagaatgtttcttgctaattgaggatgtgtgaggtttaaggctgtgagctgatctttgaaaaatagtttcctgtttctaaagtgacattacccagtatttgcttactgctttgtgccttatctcccgctttctttttagtatttctgtgagtattgtctatttgtctattctgtgagtattggactatttggactatttaaatgtgaaagaaactttgtactctcacactaggaagccataaactctaatcctcacattctgaaaaggaagtaagaaaaaacaagacttcacagacaggcttttccctggctgcactacatggatacaataggatgctttagaaacagatcttgtctctgtttttgccctaaatagatgccagcgcctcgcctgaaatgaatgggaaccgtagatggcagctcgaggcagcctggggccctgtcagagcagtacagtttgtagtctgtgctttcttccttgttttgattggtttctgtgctgctgacagacagaaagcagggatgtggttacggcttctgtgtctggtggattatcaaaacaagactggtgtgtactccattttacgagccaaaatttagaaaaaggaaaaaaaaagttgcctggcgatttctatattgagaacacagaccacatgagtgagagggctcggtaatgctagcgagacggcactggcaagacctgggtggaggaagcggacgtgcgggtgctccctcccagggttcctgcacccatggccttgagcaggggcgtgttcattcccaccgggagtgcagccagcacgaacgggcaggggtggggggcaggtggcccctggctctcctccagcattcctccaccgccttccacacaggggaggccgagggaagcccgacccagcctccagctctgagcggtgctccctcggtgctgctggagaaacagcatgccagaatctgccctctgcggccttgaccctctacagcagtccctcacctgcctctctgagaggggcctgggtcagtgcactgcggaaactgttgccactcctatatgcgctatactgagtgaatacatgtaataaaatgacaacaagcaccatatttaaaacaaataataaagcttgcctatggtgggttttctttcctttgagagctctgagagggcagggggcaggggaggggttgtggggctctgaaagaccctgagggactgcctagtggctcccaggaggacgccatgtcagggagggcgggtttatgggttgtctgccatcttatgctgtcctgtcctgttctcctgtcagtgtgagttgaagccgagcctgagacaggctcatagcaggatcgctttgctggcagacacacctggctttgaatccagccccgcaacttggggaaagttacttaacatctttgagccacggtttcctccttcataaccagacagcaacactccaagatgcttgtgaggctctcaagaggatttattccagcgctgagcgcagtgcctggcgcacattaagatgccaggaagccggatgggtgattgctcaggtctgtccagccagttgggcagccgtcagaaactgggagggctgacgagacaccagcccagagagctgtcagggagcggcagagcagaggagagggcccaggatggatcggcaggtgtcagccaggatggacgggaggagccgtgctcagagccagcagccccaggacgagcagctcctggctaggaacagaagacaggcactgtgggacaagtcaaaggtaaaacctaagagctcaccgcaagatacaaagaagcccagagccaacgacgccccagctctgaactggagacgggacagaggctgagttttgagagcaggagggagtggagctgctggcttggttgtggggtctggagccaatggggtgttggctgcccagggtgcagggccctaagttgaatactgatgtgaagctatacattaagagaatgattcttcaaagctccttagacattaataacagattattagtgagagttaatatgtcagtttctaggattccttttgatcttattgttgtccacatgtttaaaagattgaaaaatactatttgtgaagaatggcttgaaagtctagattagatatactagtgacttttccaacactaacagtttacattctggaacatgaaacatatttcatactttaattcagtcacccaacactgactattaagcatgttccttgtccttgagaaagtcatagctaggataagagtagggacaggatataaagggacagatataaacttaataataactataatgtaaatgcgatacatattttaaaagaggttagtctaacatgtttatagaacatcaaaggcagatattgttatggcagaggatcagggaactgaaaaataagtcatggaaccgtcaccaagcaatgatggttacaacttttgtttgttgtttggttggtttttgtttccttaagtttatttttaaatagagatgggatcttgctatgttgcccaggctggtcttgaactcctggcctcaagcaatcctcctgcctcagcctcctaaagtgctgagattacaggcatgagccactgcgcccggccaatggttaaacttttgagggatgagccagaatttgatgggctgttttgggtgggaaagttgctccaggcggagaggtcagcgtggacggatggaaggattttgtcctattcgttggaataaggaacattcagtggtacacattggctaacgcagaggtttccagccaatgcaatcagaatccattgcctgcaacttgtggcttgctgcatggacaggcaacaaaaggcatatgtcctagaacaacctgagcatgtggtgtggtttaagtaagcttaacctgaaggtccagtggttcccaaatttttccaggtgtcagaatcatttgaggagcttttcaaaataaattctcagccaacatccttccccactaccaccacccaacctgactcagtggcccagggcaggggaggatctttatttttctaaacattttccatgtgattagatgccacaggccctgggtgtttgggaaccactgaagggggatggaccctggaaattgtgcatcatgttttgacgttgtcagttcctgtgacccagctctttccctctgtgtgcatctccgtggcctgagctcttggggttcacccatagtttcagcccacagagcagcagcccgtgacagctgctcccagctgtgaacacgagctgcccgcctgggcttgccatttctgtttttaagatgggaagtcagaatggcttatctcaactctgaggaagtctgagccatcagcaagaggttttctcaaatacatgattttagcagattattttaagggtgggggaatttccctgaagtcaagggaggggaaattccccaccaaggagtgatgctgggtgggagatgctggtcgggaaccagctgctcattagctaggcagtgttggagagtgcctcatgaaaatagctaaatctatgtctccttgttgtcaagtgcctgatgtttaagggctgtgttagatctcacctccctttcatttaacagaacacctcaacctccaccctgttatcacaccctcaccaggactaccctcccccacttatcagtcaggggctttttttttcctgatgtcttctctaactgtatttgtaacaatccttccaatttaaaaaaatgacacctcctctatggctaccacattgttctctgtagtagttcctaaagctaaaagtggccagggctgaaaatggggactggggcattctactcactgacagctgcagccaggaggaaagcagagagggggaggaaaatgagacatttgtgtaagggatggactggggaaggaccaatgcagccccaggaatcaggggcccccagagggcagtgtttctaggagtgatggttaaccatggttattgaacaagagcattataaattcactttattacatttttggaattgatagtactctgtggaacagatgtgttctcttggaattgtccccagtcagagaggcgctgatggtcagcacgcagttttgatgaccaagggtgtgctccttctacctgactgaagctgcgggaagtgttgtagaaagagcctgctctgtctgctctcatattgattgtatgtaggcatttggggttttaaaactgatttcaatttggagcagtctttgcttcttgtttacaagatcgtttccaaaaatggctttttgggcaaggtgcagtggctcacgcctgtaatcccagcactttgggaagccaaggcaggtggatcacctgaggtcaggagtttgagaccagcctggccaacatggcgaaaccccatctctactaaaaatacaaaaattagctggatgtgatggcacgcacctgtaatctcagctactcggtagtcttaggcaggagaatctctggaaccctggaggcaaaggctgcagtgagctgagatcgcgccacagcactccagcctgggcgacagagcaagaccttgtccctcacccctcccccaaaaaatgttttttccacaccaattttttcaacaaaagaaactacggttggtgagaatgtggagaaattggaactgttgcgcactgttggtgggaatgtgaaatgatgcagccatgtggaaaacagtatggagagtcctccaaaaattaaaactagaactaccatttgatcaagtatgctaaagagttgtaagcagggtctcaaaaagatagtagcacattactcacaatagccaagtagtaaaaggagcccaaatgttcacccacaaacaggtaaacagaatgtggtgtgtatactcacaatggaatatttttggttttttccttttttaaaaatcaatggaagtgctaaccaaacaatggaatattatatagtgtttaaaaagaaggaagttctaacacttggtacacatgaatggatgtcaaggacattatgcttagtgaaatgaaccagccataaaaggacatatactgtatgatcccattcatatgaagtatctaaagtagtcaacatcatagaaacagaaagtggaaaggtggttgccaaggaacaggagaggaagaagaggaagttggtgtttaatatgtgtggccgttctgcaagatgaaaaagttctgtcgtacaagagtgtgaatatacttgacactgctgaactggaactgtgtgcttaaaaagggttaagatggtaaaagaaaggaagaaagaaacaataaaatttactttttaattattataatacattcatttctcctgattttggtgacatacattttgagaatttataatagctttacagcgtcaaaattcccttagataagaagtcatcattattaactttcatctgtagttgaggttcaaagcctattgaagttagtgaggaatggaacatgtagaggtgaagaaggcagcagcaccggcctgtgggtctggccattgtgaggaactctgcccagcagagctggcattgacacgctgtggactactacatctaagatttttcagctgaactgcaaattgctatttccccatcagcaattcgtaattcaattgaacaatgtctactgagagtatgtgacactttaaaaagtgttcaagtagagtggagtcagattacagagaagatataccgtaaaagaattttgttatgaagcaatagacaactcgcatgtcatttcttgtgacatcataaaaccactgttttaagaagttcaccttgggccgggcgcggtggcttacgcctgtaatcctagcactttgggaggccgaggcgggcggatcacaaggtcaggagatcgagaccatcctggctaacatggtgaaaccacgtctctactaaaaatacaaaaaattagctgggtgtggtggcgggcgcctgtagtcccagctactcgggaggctgaggcaggagaatggcgtgaacctaggaggcggagcttgcagtgacccgagatcgcgccattgcactccagcctgggcaacagagcaagactccgtctcaaaaaaaaaaaaaaaaaaagaagaagttcaccttggaagtaatatataggatggcttggggagggaaacagagtcatgaagactggctgagggatttttctagctagaatctcagatgagcacaggggtgggagtcagagagacctgggttcctatcctggttcggacccagcccctgtatagccctgataaatgactcaacttcttggaacctcagtttccacatcagcaatttgcagttcaattggaaatcacatactgagtgccttctgtatgccaggtactatgctaggggctgggaagacaaaaatcaaacgtctgtcctttcctttaagtctgtcctgtcctttaagatggtaagcgacctagacagtaagcgtggggaatcatagaaaaccaccaggcctggacgaagcatcaaagcatagcacaaagattcttcctgtctagacatcagacactgagaaatcccactccataaaacacacttgaattatgggacaggaacacaggagtcattaactttaagggactttaaaatcgtgaaagtagttagggtggtgaagggaaaaggatacaaccagaaaatggaatcaggtccttgacaggccccactgggagcagggattggtagttggaaggaagggttagtgagggaacggagggcaggacatacggctgctctccagaatgggagcaaaacacacagatttggatactaacactgtttttaatatcattttgtcttattacaagtaacagctactgctggaggagacagttctgcccagtgggtaagagttagatggcctgagcctgctgcacacagctgtgtgttattgggacttgagtttcctcatctgcaagtggggacaactgacagtacctcccatgtagcattgtcatgaggattatatgagccggttcatctccacagcttaaatcagtgcctagcacattataggcacctgataaaataacatcttgcaattctatttttaatttttttttaatttatagagatgggtcttattatgttgcccagcttggtcccaaactcctgggctcaagggatcctcctgcctcagtcttccaaagtgctgggattacaagcatgagctaccacgcccagccacatcttgcaattctatactgtttttcaatttacagggtgctttcatgtatcatcattccacttgaggctcaaagcacaccaataacaagtacttgttcagaatgtataaacaaccctgagagatgggttttatcatccacattcaacaggtgaaaaaacaaagaaagaaacttgaccaaggactcatactcaaaaaagaaaaatatagaaaagaaaaaaaatgtgcatcgctatcatttgaaggcaagttcatctgaccccaaagccttgcatgaagtccacatgctgtttttctttccttccttccttccttccttccttccttccttccttccttccttccttccctctttccttccttccttccttccctccttccttccttccctccttccctccctccctccctccctcccttccttccttccttccctgcctcccatgtatgccaggcaggaacacagttaagaataaagcagacaagaattactgcctttctggagcttacattctggatagtgaacagaatacattatagacggtgacaaatgctatggagaaaactaaaccaggggagacagtggagtgagagtgagggttgtggttttgagtggtatggtgaaggtgagagagggagccagtgtgtgtgtacctggggagggctgtcaggcacacggagcagcggccctgggcaaggagtgcctgcggtctttgcagccaagagcccattggttggagaggggtgggaggcacagtgtatctggggagaggtctcaagaactttggctgtctcccctgtggatgattctgagcagaggagtgacacaatccagtctaggaatggtttggcagcatcgctctggcagctatggcctgccgggggcaggggtggcagcagggagaccaggaggggctgctggagggagcccgaagctggatgggaacccaggcttaagtggtgggaggggacccaggcttgagtggtggcagaggggtaagaggtagccagatcctggacactttcaggaacttgaatcagatctgccagtgagtgggtcgtgggatgtgagaggtggaagaataacctctgaatagataaaacatacaggctaatgcctgctttacagatgggaaaactgaagctcaaagagctgaagtgacttgcaccaaggtcatttagttaggaagttagtgaagcaaggacattcacccaggaattttcactccaggctccatgactttccctcgtccatgtttcaagtctcttgcccctggcctctgccccccatctcctggccaggactgagtcagcccacccatgagcgcttcaagccatcttgcttccgcagtgtcgctaactactaatccatgatgttgaaacagttgctgttgaaacctctcttgtgattaacctcagccagagttgtcttttttctttacttttttcttttgaggcaaagtcttgctctgttgcccaggctggagtctggtggtacaatcagagctcattgcagactggaaatcctaggctcaagccatcctcccacctcagcctcccaagtagctgggactacaggtgcgtaccacgaccccgggtagagctgttttgctaagtgtttatgaagaactcagagagcagtcagtatttccagtccgtgtctctgtccagaggtttttctcctggtacctcctgtaaaggtctaacttttcaatagactcctgttaattgtgaatttatacatgattacaaccagctttttttctttctttactgattttcacagcaatagctagatcatggtaaagaattctcccttggaaaacactgttcagttcttcgaggagaaagcgtcatttttcagagctgtgctgtgggtgggaagccccaatgcctttattttactgagatgcactttttttttttttttggctcaaccacggtttaaattgataaggaaaaatgctattggtaccagacagtgccagatcagtggttgctaaaattggaagattcctgctgctttaggcattagacacccagactttgtgtatatgctcctcacccaggagcatcaggatatctcggccagtaagcagcacagttcttgggcctcgtggtctgggcagccgctccagggttagagaaggcctttgtcttcagtgttgtttcccttggagtctaaaacacactcatgcatgaaaaaaatgatgtgcttcctcaagacatcccccaacccacccccaaactcacacaccagcaaagcatactagactaggtgacctcctgctctccgactgtacgcaccctggcctagcataggaagcagaagttacatttaaaacgaaacagtcaccatgcgttgttcaggctcccgtgtttctcagacagcacatgtctggctttctcaaggcctccagccacacccccagccagacagacatgggtacacacatgcatagctggctccctgctgcccacccacccgtgctcccagggtgcactcccttctcctgaggcgccaggccctgccatgcccctggcaaccgtcccctctcctttaatgagcaggtaagaaagctagggcccagaaggcaagaccaaggctgtggagcgctttcttctgcctcttggctttgtgcttaggcccgggaatttactcctccccctccaaccccgtctcttggtctcttagacagctcactttcactttttcctcacagacacaggccctgacctttcctgaccaaaactggggatgggcccaggcaggggagtggaggtgggtagagggtgactggcaccatgcactcagagcctggaaccctgactttgtccacactgagagctctcccctggcttccattgtcagctgctccaaggttccctggctgtcgcggtgtccggcgcacctgtctgggtggtttcacggctggggcacaggtgcggacccatgggccatgcctcaatgtggcgtgtgctgtcatggacgtaagcagctggttctcctggaatcacagaagggttctggaaaggaggtgatggtggctgggatgtcggggtttctctgagaggggcaccccaggcagagggggaagcaactggaaagccagagcccatgagcagacccagctcagtgggcaccactcacaggtgctgtgtccagagctcaggcttacaggactggggctgccaggtgggaggtggcctgagcacagtctgagagaggggctggggccgggctgggagaggcgccgctggcagcacgtgcacaccttcctgctttccctccgtcctgcttcaagagctccgtgcatcaccagtgcatgagcttgaactcctcctcatcatgacagccctgtctgtgcttggcaaggaagacctaaaatgctggtgcatgaaatactacttctgcagtgttgattacccccattattgtggatctttttccatgtttatcattgttctagtgccagactcctgggctctatttacagaattggttgcttgtgacagcagtgtggctgaagtgatgaggggagggaagggaggagaggcataaggggagcaggaggctaagcatgatggtggggggtgggagtctggggctggacgtgtgtctgccgagcacctggcacatggccagtgcaggtaagatgaactgtgcatagaaaatgcaggttagattgatccgaatataaaacatctccccaagaaagaactcttcagtcagaaaccagacccatccttttctagtcaagtaactagaaacgtggatttgccaagtccttgaggaaagcaagcccatggagcaccatcccagggcgaccttcagccagccctctgtccttgctggcacaccagcttctccctcaggcttctgctttttgttaaatctccagggaacttggaatttttccaaaacatccttgactgtatctctgttgctgcaggcatgagcttggcctcccaacatggatctcagttcctgatgccatttcctcgggcagctcttgttgctgcccactcccactaacctgtgttctccccagctggcttccctggccccaggctctgccccaacagctcttcctccacgtcgtagcaaagtctgtcattagcccagccctcatcgtgcgggacaccatcaccacagtagcactctctgtggagttccagctacttgtcaaggatgctaaaagtttcacctgcattctgtggcctgattcttcaaaaagaaggacatgaagctcagagaaatgcagtcacttgatttaggtcccatgcccacagaagggcaggaccagaattcagacgagactctgtgaccctaaaacctcttctctttctgtcatatgaggggactctacttaggtcctgtggcttcctttctccaaaccctggaacagcagcccaggatgaactctagcctgtgagacccttctgtgtgcccccgatctttgcagtcttgtctttcatgagatgtgcagggagtctgtggagcatgtgcttcgaatcaagccacctgtgatttgcaatcgggccatcgcactgttctgagtcgcctgctcctcttccaggaagcctttccctgactggggaggatcccttcctctttaaaatcctgccacttgcttcagactctccctattatatttccacttcctggctgcagtcatcagaattcgggttttattgcatccccttaaagacaagggtcatctgttgtatagctttctgtccccagcacctgacagtcattccgttggaaaaaatactgatagattgcttcttggacttttggctaagatcaagtagagaaacagtgatggagacatccctgaacttgcacaggaggactgaggccatgagtctgaaagaagagactgctcagtgacagattgttggctttgccaagggtggctcattttcccaagaaagaaaatctgactagcagggtggccaatctaaaaagctgcaccatccttaaaagatctttctctctcttttctggtaaaagtactatataattcctcattctcatattttgagttccaagcctttcaaatatgtacagagagtaagaatgatggcacttttctactcaagacactgttgggatgtactggttttagtaatactgttgccttgcagataaaggatggaagcagaatattggatcatctttttcatcttttttacctcctcagctttccagcacattgcttggcagcattgttatctatatttatgttgttaatatccagtttggagcacagacttccaactaaattacacataatatcctgatggtcttcactctgcaaatggtattgtgttggcaatacactctttaacattccacctctcacttaatgtcacacttaactgcagctcttaactttggagtaatgtagacattttctaatagtttcttattctgagtaagatgcagatgattaccttcccttgggagtatgttaccaaattttttcatcatatgaaaaaatcttgttagctgtgtcttttaaatcatgcctttgttttgtatgttttagtttcttcagatggaggtactgagccctctgccttagtggatgacaacggtagtgaggaggacttcagctatgaagacctctgccaggccagccctcggtacctgcagcccggcggggagcagctggccatcaatgaggtactggaattccacacgacagtagtggatacgggatacctgattttcagggtccacaaccacttctgactttgttccctagttcttctttactaagcatgtccgaaaacctggaactctgattaaaacaacactgtgattcactttggaaggccaaggcaggtggatcattagtggtcaagagtttaagacccgcctggccaacatagtgaaaccctgtctctactaaaaatacaaaaaaattaggtaggcatgatggtgcgcacctgtaaacccagctacttgggaggctgaggcagggagaattgcttgaagctgggaggcggaggttgcagtgagctgagagcacaccactgcactccagcctgggcgacagagcgagactccatctcaaaaataaagaaagaacaacactgtgattctctgacctcgtccaggaaaatatatgggattaagctttctgggtagaggcagctcgtctttttaggtaaggaacagcagctccccatcagtgttcggccagtgctttccacttgataaagaataccctcccctccactatctcatgtaattctcacaactgatctaagaagcggacattatggttattatccacattttcatcaacgctctaaggaaagatgtctaattactggctggcgaatggcagagctggaggcacccatgtatttctccctccaaatctggtgttcctttggccaccctgcagctttagctttttttttaggaaatcattctggaagatacctccagcttttggcattcttgagcagaacgtgtggagcataactccttagtgagtcagcgtctttactgagatggccagtgatgtgtatcgttgggcgctaaggagatgggcaaaatcacctgctcccgtggccaggggatggaggagccacatctgttcctgactttttaattgttaacgatctcaagatcatgctatgttctcttcaattgctgtaaagtgtaaagttagatgcaaaacttactcgaattgtgaataaagtatgaatgatccacactggagggagatgtgagggacttccaatagcatatgtgcataactttagtaggcttggctctgtgacatctagtacggctgccagaaaccatttttggagcaaatatttcagaattcaagtttgctagataactgacctgctgctaagtgagcagctagtacttttttaaaaaggggcctgcctgcctgcctgccttcctccctccctccctcccttttttcttgcattttgctcttgttgcccaggctggagtgcagtgatgtaatctcggctcactgcacctccgccttccaggttcaagcaattctcctgcctcagcctcccaagtagctgggattacagacatgtgccaccacatctggcttttttttttttttttttgagacagagttttgctcttgttcccagactggagtgcaatggcacgatctccgctcactgcaacctccaccacctgagttcaagtgattctccagcctcagcctcccgagtagctgggattacaggagcccaccaccacgcctggctaatttttgtatttttagtagagatggggtttcaccatcttggttgggctggtcttgaattcttgacctcaggtgatccacccgccttggcctcccaaagtgctgggattacaggtgtgagtcaccacgcccagtttaagcgctttctttaaaagcaggtagagatgtcctcctgactttgttttttcttagtctgttctcctgggttctctttgtgtaaccagtcacatagtcagtgtggaccaaatgccaccagcatatccaagtgagaggataccagtgtcaccctgagagagtgcacctagtggctccctcaccatcccgcccactcgtgctctatgctgagcgcaccccactgtctcctttcagctgatcagtgatggcaacgtggtctgcgcagaagccctgtgggaccatgtgaccatggatgaccaggaactgggcttcaaagccggggatgtcatccaggttctggaagcctccaacaaggactggtggtggggccgcagtgaagataaggaagcctggttccccgcgagcttcgtcagagtaagtgtggggtgcttgcagcttttccaaagtacctgggggagctgcaggatcctttcaggtcagaactcgccttttatcaggtcagctcttttgtaattgatatctgacatgcaagtcacacctgtaagaaattaggctgggtcggagcaaaaatgttaaaggcaggcaagcgagttgctcggtgtttctctgtggtcctcgtgcctgctggcatagccgcagccctgctgaggccatgagactcaggcgagggccaggctgccttcctaacaggtcacaggaaagtaggaacctgggaggtctcctgcctctgctccatgctgccctcccctgccccaagtcacctgtcccctgtatgtgggttgcagttgcgagtgaatcaggaagagctgtcggaaaactccagcagcacccccagtgaggagcaggacgaggaggccagccagagccgccacagacactgtgagaacaagcagcagatgcggaccaacgtcatccgggagatcatggacaccgagcgggtgtacatcaaacacctcagggacatctgtgaggtgggacgccaggctgggacctcactgagggtcacagtatgaggctgcatgaggtgcctgggctttctccccacctccaccccccgcccccccatcaggctcccacatgtatgctcatttctccgcctctgctgtctgcactgctaagtctgagtgctgcggctgtcctagctgttggtggaggttttttagagtcagggtctcttttcagagacaaggcttttcttagagatagggtcttgctctgtcatgcagactggagtacagtggcgtggtcatagctcactgcagcctcaaactcctgggctttaagcagtcctccctcctcagccccccgagtagctagggctacaggcatgcatcaccacacccagctaattttctaaattttatatagagatagggtctcactgcgttgccgaggctggtcacgaactcatggactgaagcacttttcctgccttgatttctcaaagtgctgggattagaggcgtgagccagtgtgcccggcccctctcttaagtgcactctgcaactatctctatcaggacctaattcctgagattatttgaaaagaatggctttcatagaaggcaacaccctcacttgattttacaaagagtcaaaggtttgtcactatctgcaaccccgctgcatctaatcaccaactgacagatgagatcctgagtcatttagacacagatgggaaaaaatgctggttttatattggtcatatgaaaggctatattctattgtcatgctattctacttggcaacaaattttattttatagttttatcctgatttcagagaacttgtcattagtagaggtgcacctgaaaggttttgtcttcctgtggtattttgtgcttctatggattgtgtacgagcatcacactacactgctgttcgccctgtctgctcattacggctctcctagctgtaaatgctgatatctgcactatcagttcaacgctgaccattcagtgctgaagacaggttgaagtcagagaactgcccgttctctaatcggattagccagctgtgtggacatgccagtgtttagcttctttgtgccagccatctcgttctgtatgagtgtgtggcgaaagaagcaggtctgcagtgccatttagggaaataagaggaagtgcccatgattattgagcattgactgtttgtcacccctcacctggattaactcagctaccacagcattccccctgagcaggtcctgttagcccccattgcagatggggaaacaaaggcacagagaagttaagtggtgggattggatttaaacccaggcagtctgccccagaacctatccttttctgaactattacattatattgttttcctgttaaaattcataccaagtagtcattggtatgtgttttactccatggtcagtttattctactgaatgtcatgataactctttttgagttagctgttacatgtatgtacagccttttcttcttatcccactagctcctacctaagccatagtatagccatggtgttgcacatagataattagtgcaagcctcagattaaagacccacagattgatgctgtccatagaaaggcggtgctggtggaatccttgggtaagaggaatccttgccctgatgaacagtgcacagagctgcatgggctattcagcaagcagtgacattctgcatttgacaagtctcctgggctgtgaaatggaattagggttgggagaatgattacctgaagagtttggaaaaacacgtgacgacaccaatttttgagctctggtatttgaaacttgtttctggaaacattatatggtttattggatcctaaatccaaccgcatgagcctttttgctttctttttattttaaaacacctatggcaaattgcagtcatggaagtacgatgacctcatcagagactcatagagtctttttaattaaaattcattccaagttcatggctttaggcctacaaaagctgtactattcaaataatttatttggatttccaaataaaaagtattacttctgtattttgcagggctatatccgacagtgccgcaagcacacaggaatgttcaccgttgcgcagctagccactatttttggaaacattgaagatatttacaaattccaaagaaagtttctgaaagaccttgagaaacagtacaacaaagaggaacctcacttaagtgaaataggatcttgctttcttcaaaatgtgcgtcaccctttacttcattattaataacatctgcttacataattttgaagtgcatctccacagaaaacaggagtctcttttgttttattgtttgtttgctagatgaatcttccatagaaaggagatgtttcttctatcttatatgcttatcatataaacaaaatctgtatagttaatcttgtctaaatgtcccaaattcattttttcaaaatccttttatgtagtctggaattagggggttacatttggagtaattactttttaaaaatttctaagggttatgccataagaactatggagtccttcctaataatatccaggaagtgtctattacatttcaggcactgtttccagggttttcttatattagcttgtgtattgctatgaggtagatatgattatctctcactttctagatgaggaaactaaggcccagagagtaagtaacccaagaccacataccagtaagaggcatctgtgaaggcagacccgggcatgcggctccaggacgcatggttgtgatactgtaactgcctcagaaccttcctgtgataacatgcatttatcattttttaacttatgattgactattactacttaaccgctaaaggatttcagaggaagattttagtcccagcccaaatagctagggaacagtaagagtaataataataacaatgacagcctcaccacaccttcacttcctgggtgctgggctcagtagctgtctagagtcctctggggcagatagattttaagtggctgggcataatgtttttgtgttaagttagtcagctggaggctgggccccatgtgtgacgtgggcatatctgggacattgtcacaggcctccttgtgtggcctgtgcagaaggttcctgcaggagccagcttaggacaggctggaggccaggtggtggcatgaggaaggtaagtctcacagtgaggacaggggagtactgctgccaccagggaaggggtcttggcgggcccagccagggtgacggcagagaattgggaagagaggtatgttgaaatgggcatttttgaggaaaacctgacaagactagttgtaaaccacaaagaataagcaacgattaaaactgcatacatggttttcagcgagttgaaaaaatttgtgggagggggacgttagaggccctgctccccaccttccaggatgagcgtgaggcaggctagaaagagaccagggtgctgagttccagggcagcctcatccccaaccccctcaggagcctgctgaagcaccccttctcgccggccagataacgcttgcggaaaccatggcagggcagcttgggtgccagcggatttcatgccctgtccttcttgcagtagtccatcttcctcctttctaggagtgtcccttagagagggctgggatgatgcctgtctttgtcatgtcccagaggcaccccagaagctgacgaagctgtacttttccttcccagcaagagggctttgccatctattccgagtactgcaacaaccacccgggcgcctgcctggagctcgccaacctcatgaagcagggcaagtacagacatttctttgaagcctgccgcctgctgcagcagatgattgacatcgccatcgacgggttcctgctcacaccagtgcagaagatctgcaaatacccgctgcagctggccgagctgctcaagtataccacacaggaacacgggtgaggggcatgggtaaggggcacaggtgagagcactgctgccattacccgtaggcagctcttaactccaggcagtgataggtgggcttcagtgtcagccttaacactttgggagctccatgggagaagttttcaggttgtttagaatgtgtgcaattaactattgaaatagagtggttgaagagcctccaggatatccagtcctagagctatgaagacacaagggccattcgtgagctgtgccacgagtgcatggcggcttttgttgtattgttatgttgcttacctgtattttataaacatgtctttgagtactcagtagttagtaaagacggtttctgagggaaacagaccagtgtgaatggaaagccataactctggttctctcctgtacccttgaggttgacgtacagcagctcggctcagagcaggattctttatggcagaaacattacttactagtggcttacctaaagttacttgttgttaagcagtctctatttagcaaccccttctctatttagaaggggtgagggcacacacaagcttgaactgtaaaagggtgtggattgtcaggggtgcaaacccatatggggcagctgagaagaccagggcattgggcacctgctgggccctgagccgttccctacccaccggggtgccgactctctggtcttctccctgttccctcctgctgggagcacagggcttccttccatgcttacctgaatgctgcatctcccttcgagcttccttggtgcctgactaagctcttcttgttactcacacttctgttgtttggatctcggcttctcctgaacaacaagcaacaaaatacactctctctctgtctttatttttttatttttttatttttttttttgagacggagtctcgttctgtcgcccaggccggactgcggactgcagtggcgcaatctcggctcactgcaagctccgcttcccgggttcacgccattctcctgcctcagcctcccgagtagctgggactacaggcgcccgccaccgcgcccggctaattttttgtatttttagtagagacggggtttcaccttgttagccaggatggtctcgatctcctgacctcatgatccacccgcctcggcctcccaaagtgctgggattacaggcgtgagccaccgcgcccggcctctctctgtctttattatctgccttggttgtttctggattcttctcacgcccttgttccctagctatatgatctcttctgggggagccaaaagttaccctttgtttccttaatagccaaccatcatttcgtgcatgcacagaagcctttgtgtggttatacattaggcatgtcacccattcagcattggaatgtgcatgcccattttccatgccatgggaaaatgtcatcacagcacagcccagctgttgggtacctcaaggtagcagtgcttggctaattctgagttctcacctggccagcagggacaggatagtcatagggcaactgctatgtgccaggctccaagccaggctacccaggggcgcaggggtctaggctaaagctgactcttttagatgagaatcgaaacagggtccatgcccctgacacaaagtctttaactgcacctgcagctctggagagggtcatctcaaagggtcctaatgagaagaggaagagggaagggattgtaccaggaggaaatttctatggcaaaccacaacagttctgggtttcagcagctaaatatcttcctgcagggagtggagagtgaatcattattttgtcctctctgcctctgaactcctgtggagagacagacttaaaaaaggaaacttctggccgggcgccatggctcacgtctgtaatcccaccattttgggaggccgaaacgggtggatcacatgaggtcaggagtttgagaccagcctggccaaatggtgaaatcccatctctactaaaatgcaaaaattagctgggcatggtggcgggcacctgtaatcctagctaattgggaggctgaggcacgaaaatcgcttgaacccaggaggcggaggttgcaatgagccgagatcgcaccattgcactccagcctgggtgacagagtgagactttgtctcaaaaaaaaaaaaaaaaaaaaaaaaaaaggcgagggtgtggggagagccttcttacaattagattggaaagtaaagaataagagcagatcactgaacaatagacactagatatgggtgttagctaaagagttaggactaaaggaattagaaaaaggagttcattgaaatagataaaagaagagagagctatatatttttttctttttctgatggagaaatcagaaaagttcagtggaaaaaaaaaaacagggaagtcaagagagccacaaaattgaagaaaaaaaattatagttgtaaataccttctacagattttcaaagacacttttaagaaaatgtcctgatggcatgatgaggagtcagagccaaagacaattaataagaaaattaagaagcaaagacttcttgaaagacgtgggcaggcagcttagtacattccgagatgggaaagctgggtccagaagtccacacctcactcttcagtagttgattttcttcctttaagggcatttttcaccaagagcatttgcagattttggttttttcaaaataaaaattagttgacatgacagaaagtccatttccttgtcttaagtaaaacaaagcaaaaattcttttaaaaaaaccattacaatttagttttgtccagaaaaacttattttgcgaccctttcttcattgctggaggcctctttgggggctctgtgcccattattttggcagtccctggtgtcattcttgctcctgctctctgcgccacttctgggtgtgaatgggcgtctctgaagacagcagggtctgcttggtgggcagtgtctggggacttcacaggagctgggatgaattgtgtttggtaaatagacaatagaatctgctttcaaggctttcccatggctgcgcaggaggattctaattcattccagctgtgatggagtggccctgtctgtgctgtaagttgccacgggaaagcggaaaatatagctcattagctggatggttggtctccatggccccgcattattaacgctgagcaaaacctgaatgggaagcttgcagatactggacatgctctgtgctagcctgtgtgtagattaaaactgtagtttctgcttttccggtgcctacagttttagcgggcttgggagcggggccctcctggggagaacattttagcttgacgtgactgtggtggacggaaagcaccagaaaggaagatctgttggtgaggcgaatgccatactggcatttccgtaactcaccacttcaggtgcctgtcctctcctgtcctttcccgaacagcataaaagatgaagactcagagcaaatagtcactgttgaaaatggttagtgatttttaaagtactttatgtagcaagagtggttatatgagaatcagagccataataaagactgttctttctgtattaatgaaagtcacccattgtcaccgtgactaaaacttacttatttgtggcatttactgtcattcattgtaatttctgggaaatgagtgaaaacatttttattccaaagaattctgaattgcactgggtcagctcccttaatctatggcagactgtagtctattcacaagggaacaagaaaaagggaaacagtggctaatgacgtaaatgtcactttgtctagagcattcgtatacgaagaagcgccccagtggattattttgccagtcctcatttgtaaggtgcatgttatgtgattaaaattaacctcccatcttgcagtgattacagcaacataaaggcagcatatgaggccatgaagaatgtggcctgtctgatcaacgagcgcaagcgcaagctggagagcatcgacaagatagctcgctggcaggtgtctatcgtgggctgggaggtaagtggaaagcaccccacatgatcccatgccactcgcccttcccgcacctttgatctggtgcagatgcactttaatatcctgtggtcaatatcttatattcttggctttaatggtacatataccattaatggtaaatgtatttcgaggcatactgttgaatttaacagtcgactactttataccccactcccataagaaataaaatctgaagagtatctgcagttaatttattgctgagcctctctctctcctcgtagagggagtaccgtgggaacagtagagggcatttcagttgcagccacataacatagtagtagaagtatgggggactctggagtccctgcccacatgtgaatcctgtatgatctggccaagattaatttttttatcttataaattggggaggaaaatattacctacctcataggctaccgtgagcattttataaaacagtacaggccaggcacagtggctcacacctgtaatcccagcactttgggaggccaaagtgtgagaatcgcttgagcccaggagtttgagactagcctgggcaacatggcaagaccccatctctacaaaaagtaaaaaaaatcagccaggcatggtggcatacacatgtattcctggctactcgggaggctgagttgaaaggatcacttgagcctaggaggttgaggctgcagtgagccgtgatcgtgcccctgcactctagtctgggtgacagagcaagactccgtctcaaaaaaaaaaggaaagaccacaaatacaatgcctgtaataatggtccaacaaattctcactctctctctctctctctctctctctctctgtattcataaaaacagtgacaatagcacctgtatgtgtttaccacatgtctgaatggcactgatctgagccatttgtacatatatgaactcatttaatcctctacaccatcctatgaagtaagcactattattatacccatttaacagatgggaaaactgaagcacagaaaggttaaataacttgcccaagaccacacagctcaaaagtagcagagctggattcaaacccaagcaggcaccctggcttcaaagtccgtgctggtgatcactgtgctctaccgccattaaattaagaacaacaagcagatgccattcagattgtttttagaccaagctacattgattttacatctattaattggtcagaactcactctcccagaggactgagaaagtttggagcaagaagttaggtttttaactgaaataggctataggtggtgaaaattggagagaaacacatacatttcaagggccttatagacttctggagtttgggcaggatctctgagaacactgagtccaactcttttatttcatcagtgaagaatctagggcacggaattgctctgagcaagtaaatagaagaactattttggagtcaggctcttttgcctccaaaaaatattgtgtgtgactgggattaagggagaatcaaatcttatttaacaaaggccattgtcataccaaataccataaagtaacattggattagattcaacctaaatataataaaagtgtgtttttctttttgattttggacgctgacatttaggggataatttgtcagaagttaatttcttgctgacaatttatcgtctggccttttgtttctatgaccctgaacaagttgcaattccagggagctgccatatactcaacgcaaataatgtcaggtccataatcacgatactgtgtcccctgcatgaatgctttctcccatgtaagcctgcgtgctctcactcttggaggctccgtttgggtcagctgctgtttcagatcttgactgggttccattaattcagcatgcctcttaccagaggcttcaggctaggaagacccctcagctaacacagaggcactgtcacatttttctagtaagcaggaaaaaaaaaagaaaaggaagaaatttcaggcaccaggagaccaataaatccaggtttattacaaataacctttgaggccctgcccacctgtgaatggggacaggtggtaggcagcctcaggtacctagaaagtctgagaaagattctgtgttaggagtctcttccatatcctaacacctgaaggaatccaaattgggagtttgtttttgttgttgttgttgtttgtttgtttgttgttgttgttgtttagagagaagggtcttgctctgcccctcaggctggagtgtactggcgtgatcaccattcactacagcctcaaactcctgggctcaggggatcctcccgcttcagcctcctaagtagctaggactacaggtgtgtgccaccatgcctggctaatttttaaaattttatgtggagatggggtcttgctgtgttgcccaggctggtctcaaactcttggcctcaacgatcctcccaccttggcttcttaagtagctaggactacagctgtggtagaattggaaggtcttaagatgtgttttcatccttccagggactggatatcttagaccgaagctcagaattgattcattctggggagctgaccaaaatcactaagcaaggcaaaagccagcagcggacgttcttcctgtttgaccaccagctggtgtcctgcaagaaggacctgctgcgcagggacatgctgtactacaagggccggctggacatggatgagatggagcttgtggacctgggggatgggcgcgacaaggactgcaacctcagcgtgaaaaatgccttcaagctcgtcagtaggaccacagacgaggtttatttgttttgtgccaaaaaacaagaagacaaggcgaggtggctgcaggcctgtgcagatgaaaggaggcgggtgcaagaggacaaggagatgggtgagcagcccttggctctgcaggcacctgtgcctctgcttgctgtaatagcttcattctccactcccatgggcctgctctgcccagccttctccctcagagctgaatcccaccatggggaaaggacaagggatctgcaaaccctaaatacttctgaatgcacttacaagacagaccatgtcagatgtagttactaccggcaacatttattcagtatttaccttgtgccagacattctgtggcccatttatagagattgtctcattgaatccctatgaagtggttgctgttattatacccaatttacagatgagaaaattgaggcttatggaactggcccactcttgcactgtggccacataacatttaaatccagcactttggatgccacatgcagggtatgaagaataaataataaaaccagttcagtgtgaccccagagatggaaccccactatggtgaccatcacccaggctatcagaagtatcacgtgattctggaggcctcccctttggctgtgcctgtgcaataccttcagtgttcttcactgccacagttgatccacacccagcagcctgccctcatgcttcccatctctccctatgaaactcaggatgccgcatcgtccattgcagttaaggcgatggtacttcacacccagtgttacatttgtacttctttggtttgtcttcccagcttctgctgacctggaggtgcagtgtggcccctgagactgaagctgccatgcctggcattaatgatggcagcacccacagtctctgagcctctatttcattgcctcccaagctctttagggttttgagcacaatctgttgaatggaagtcagggagccacagtgaaggatattcatctctgcagcccaagtgagcccagccctcaaaagtcatggtccaggacggaggggagccagcatacgcccctccccatccttgcccactgccatgaggacagcaggactaaaaaccaggaggtgctttttctgtcctccccagccactggctctaagcttggctacagaatttggtctcacccacaggaggttttgtgagattctgcagtagagttggagggatttacaagttggtcaggctaaaacggaagcagggatcgacttggaaacactcaatgggtagacattggcctggacttgggccactccaagatacagagctccccacatcacaggcagccccttacaccaagtgtcagggtgtcctttacactaagaggaaatctgattcccagcaacagccatagattattggtgcagactctggggccccattggaatagggctaatcactcgtgcccagaattcatttgaagatgacagttactaaaatgcaaaatgacagagccacaaaatcttagttttagtcgtcatatgacgttgtctagcgcaggccctgaagtcatctgtaagtcagagtgtttggattcccaaagacggcactatttagtgggggcatcctatgtgctttcaacagtgtctctcaataggaaggaaaggaggggcccgatgtggtgccctttgccatgtaatgctccctgtggccagtgctcagagatgcaagtgcatgactgaggcactcctgagccagtaagtctgtgaactggcacgtgtgggataaaactggatgcattccttgcctcgaatattttggcagccctcgtacttgatgcatgtgtgtgggtagaagcttcaggtagcagatcagagagaatggacacggagggccttggaggcagggacagcccggtggccagcgtacagagcctgagcctgacgtcaggacagtctgggacagatgttgggcatgtgaaggaatcagggccaggggagcagagtgggcagaggtagagagggagcctcgggagcgagccaggcagtgcaagctagcagacacagggcctgggtcagctctgccaagctggagcgagtacctgcctacaggaggaaggcttcccgcgggagaaggcagggccccagcacccagccctggccattcagctctgtccttccttctccttccccacaccctgcgaagccaagggttgcctcatcttgtctttccagtgactcttgtttcacccagttcacacactgcacacgtacactgtcactgtgctactggactttacagtgagggaatgctcagggcacacactacacacagctggggtacagaatccgctacctgctactcacgtggtacctttgttcagggtggaactgctaacgtgcaaagctctcatagcgtatgggtgaacacgccctgggaccctttgctctgtcctctccttctggggcctcatcctttaggttataattgggatgaccctgtgggaatatttgcccgggagcgtcgggcttcacacagacattctgcattctcatgagcaccaccccatttcactctccaaactgtccgggtttgcaggacaatcacatggccaccttggcgataatccttgtgacttccccttttctgatcttcaacctgtccacgttctttgaggattaaggttctctgtctcaggttgtggtgataacctcaatgctgatatgggctgtgatacaagttttgctctgaaacatgtccacgtgttctgaatatatatcacatttatttctaaatgcaggaatggaaatttcagaaaaccagaagaaacttgccatgttaaatgctcaaaaggcaggacatggaaagtcaaaaggtaagttatggagaaggctttgtccccttaatgcttatcagtattctcctgaaaatgggagcataccccaagttgtcagcctgtgaccagcttggagcaaggagaacagtagaagttagaactcaagggcaggtccagaacaggggccaggtgaaggtggcctgtgtttggttttgaatgtgcgtcagtgtttgcttccattggaatgtgggcataggaaaccttcagaggggctgctggagggtggtggacctccttgcctgcctggggcccctctgctcccctcccccaagtgctgatggtgttagccacaaggtcacgcacatccccagtctgaggcaaaccaaggactcttgcatcttttaggcatgagaggacaaaatctcaaaccccaaactgcttgtcagctgtaggctggatatagtctagtttaagtaagaaaaagatgtaaaggttcggtacatcaggcaaggagttagacaaaaaaagacacgtgagctgatttagggcggtgattccctaatctccatgcacattagaattccctggggaagctgttcaaaaatgctgatgcccaggccgcatacccaggggctctgatgcactaagatttgtccacacaaatctggcccaacaggatgcagataatctggcccaacaggaattcagtaataaggatttttccccaaaaaatatgcactgtattcttagaaactttattcccgtcatctttctactttaaaaggcatttaccccatgaaatgtatctcttttggtattttcctgactgcaaatgcaaaaacaaggaccaacgaatcccaggactgcaatagaccactgacctttagtcagtgaagaactgattccccaaaccacacttaacactcccctgctttctccatgcaaatgcagaatttcttttccccactaagttacaaatatctttaaggcagaaaaacccatgttattaatttttttaaatctccacttctaatgtcagatgactagtaaatcaatttgttagaatacattgttttctgtccatatcttctgcgagtcactcgcccagcagccaggcttctcaagaacggaaggactgctgacgttcacaggtggctaccgggtgggacgctgtgcctgggttatctgatttcttccttcctgccacctcgggaggtagggagagccttctggcaggccaggggcagggacgggttctgagccaaggccttcctgctttcagggcccaccctcttcgtgccatgctgacttacacagttacgttttaatctaatcgctaattttaataaaccttctaaattacctctgcacagattaaaaatacctatgccggtgaagttttgattagagtgattagatattgagggcacagttctaagcactttacttctattaattcatttaattctcatagcaaccccataggtactgtaatccccgttttagggattggggaaccaaggcgtagagaaatcatatcatttccccagtaatcccagctgataaatggcacagaagaatttgggccaaggcagcatgagctccagacttccatttagagcattttattgctactcaccttgactgtcagtctggttcagattctgccacttcccgctgcacgtcctggcattcagtttctttccctgtcaagttgttgtcataataccctccttggaggctttttgggagagttcagtgagagagactgtgtcacgctccacacggagtacctgaacataacaagtgtagctactggaccttctttttggttaacgtgaattaagaattagctctctacaaaaaaatataaaaattagctgggcgtggtggcacacacctgtaggtccagctacttaggaggctgaggtgggaggatcgcttgagcctgggaggtagagattgcagtgatccaagatcacaccactgcactccagcctgggtgacagtaagaccctgtctcaaaaaaaaaaaaaaaaaaaaaaaaaaaaaagaattagctgagaacttggacttggagtctcagcatttttatttttttcctttctggttaacaagcgaccctcagtccctgttccatctctctcccctcccgagtcaggctacaacaggtgccctgtggccccaccgcaccagggcctgcaccccatccaccagcgccacatcactatgcccacaagcgtcccccagcagcaggtctttggcctggcggaacccaagaggaagtcctcgctcttctggcacaccttcaacaggctcacccccttccggaaatgaaaacaggaggctgtgcttccatggagctgggtgtcaagagaagaactgtctttgtttcttgtgtgcttcaatccagggaaagtttcttggacccagtgataaaaacttccttttagggatcaatgaaggagagaaggtcttggaatcaccttcagtctttggagacccagctgcctttgtggaagggaggagacggtcatgacacaaagctttatcctacacagaaacacccgtgacccactatgagatggcccagatgtgggacccggtaccatgctctaaagcgagtgattaggcagcagctgaagccacccctgctgatgatgagcaagtgcctgctgcaggtccaaacacagcatccagggctttgcagttcctaaggagtgatgaggttagaggatcacttctgcatttgattttcaaggatgccgtcaagacggggttgacacaatgctgcacgtgtctggtcacacttagaaattgagctcttactctcttctgtaatactgggggacctacagctgccgtggggctgaccacggtgttccctggcatcgtctgtgtccacacagatgctaactggtagtgcaaatgtcatcctgcaaggttcctcttcctgcaagcaaagtggagagaaagaagatgcatctgtcaccttcatcagggtcctcagtgcagagcaacttacgcatcctcaagaatccactgcttttcaggcaaggagggagaaatcctgctgcacactggctttgtcccggagtcggattccctcctgcctgcacgccttcagtaactccgagcagaaatcacatcttgcccacatgctgtaacctaagaaactgctatgcaaggctgggtgctgtggctcatgcctgtaatcccagcactttgggaggccaaggcaggtggatcacctgaggtcaggagttcgagacaagcgtggccaatatggcaaagcccagtctctactaataatacaaaaattagctgggcatggtggcgcatgcctgtaatcccagctactgggaaggctgaggtaggagaatcttttgaatctgggaagcggaggttgcagtgagctgagatcgcaccactgcactccagcctgggagatacagcgagactgtctccaaaaacaaaaacaaaaacaaaaaacattcaaacaactgtttgcaatataaaaagctcatttactgtaatatttatgatacagtgaatatgaaaatgcactggtcagaaggcactctcaaagagccgcactgctcctgacatcgtccttagcaatgaagtcacaaagacagccaaagcagtcctgcttcttggaaatcagaagctgcctttatcacatataaagccaaacagggcataaccatgtcacgtgagcatgtcatcaggcttctgaggacttgttctttataaaaaaagaccttcacaaaatatcttggcttagagatagcagtctttattaacaaaggccacctaggctgacacctgcagataatcatctccttttctttgtctatgttgtacattttcatgatataacttttaactatgtctagagaaggcaggctctgcaagagaggtgccctttcaacccgctcagtgccctggacaggagatgctgtgttaaactgttaatggatatctatatgagaagctcatttttgtatgctatccctgcagtttttttttttctaacaggcccatgtttgagaataaacaagtctgtgatgtcagagacaaaggtgtattcttcagtctgcaggtgtgtggcacctcccttctcccctgcagccccccacatccagagccgttcctgagagtgacatcatgcatcaagaaaacataaccttggtcctcaggtgaacccttggaacattctgtgaccgcctgatgtccattctgagccaccttggcacacatgcttacaggcagcactgctaagggttcaggtgccccatggctgacagcccgagttgcttctgtggaccatcatgccgctcggcacgtcctgagacagaagttgctgcaggaaggagcttctggagaggtcctgtggcatgtgtgggggtgtgtgtgtgtatgtttccttcttgaacagacattccaactttagatgtgtttatagaactgacctttttactaacaaaatacaatgatatatgttggaaactacttaatatgcttttcctgcacaccttagcaataactgtaggggtctctgctagagttgtttgtatgtacagcaattttgaacaaattgttttaaatgtaatataagagaattagtttaaggaagtaaagagaatcatttgcttgtgttacattttcagtgaggattcagtttaagagtcattcttaggacttccatttcctaatatttattcatgggtaatgaagaaatggtttgcattttgtggccagtcctaatttattttccagctgagccctaacttccggctcccacctacctccacggacttcctaacagagacttatgaataccaggatgtgtttttgttaagtcaggttcaattcgttgcccctgtcagttttatagagtgtgagggtcactccattaaagatctctcctgggtggatcctacttggatgttcaggtgattttgaaaactgctaacatttttaaaaggctagaacatcctttgacttcttgaaaatctgcatgtctggcttgggttttattaccacatgcctgagttcttcaagaatggaaggctcaagtattctcatcttccatttgccaaacttccttcctgatttgagtcacgtgttccacttggaaagaaagggaacagagagcctcctccatggacagtgtatgaatttcattgggaatcttgctctctcccgcctctatgcctttctctctttttaaccttactttacataatattatagatgggccaagaaaagaaaagatgacataacattttgatgaatttcacctattccattcttcacgtttcagaattggtcgactttgttagaagataattgaagtagccttgggtcaaaagcaaccttttcaattgtgatcatacctaaaacatataaaaaccctgccgtagattaaaagcaattataaaatcataaaattgaatgtttgcagaatcctggagcagtagatttctttgtctttggcctgcggactagaaagagggcagcagtagtatgctggagcttccctgggataccagccacatggtttcttttcattagatctgatttttgtttcccactgtagatctgattttgtagttgaaaacatttcaccaccatcaaacactatttctgaatattgtgcctttttatacctagcctagatgaaaaccgatgccattcttattcagaaaatccccccatcctacatgactgttatctagacataaagcaaagtgcatttaattcaaaatttggttcacaatataagtattttgtaaaagccagctgaaccagcattttatcaggtggaaatctctgcaagccaaattgctgatactccttcatgcagatcaacttggtgtcccagtcagaatagaacagcataattacctggagttagggggagtatttctgcactattacttgtcagggagagaagaaacttagaattgtccctcaaaggagtgtcaagaagtatgaataaatgtcctttcaccagctcacaggccagaaatggaggacccaagtcaactaggtgaaactactagcagacccagctttcccataataacctaatctgcaaattgttctattaaagtctcattgttttcaggatgcaatgaaagtggatttcaaaaggctttggaaaaataagtggaacatgactgatcttgaaaaaaaaagcaaaagcttaaatatttgatacaagtttacttagctacaacatactttacattgttgcctttagttatctcacaggcactgacattttatatttagaaaatacttttaatctttctaatctttttttgtaaatattagtgtccattctgtatgactcgctaacctactttgcaaggctttgggcaacattttagctcattaacttcaagatgatgtgtcatctgtataggtcaaagaatgggacttctgaactgaggaatttgctgttgacagccaaagtatagtgtacaagattgatgtaacttgatatgtatttttgttgaagttttttgtaaaaaaaaattatttacaatgttatttgaatgatttttttaaatgctgtgaatctatatttgttgttttgtatattaaaattcatttgccaaactcgttctgatgatgcatttgagtagcagcctttaaaaggaggaagtggagagctgggtgcgggggcttctgggatttgtagctcctctgctgccctgatgtccctagacttctcagtggcaacaactcatccattcaggagctccatgtaaccactgggtaggcgtgggagaaggggggctccgagggcaacctcggagggcaccctggcttgagaaacgtcagtggttggagtaagagggatgcggaagggagcagtggggcggggccgcttttgctagggatcatggagaggagacagaacaacagactgtgccctctgactgcccctgaaggctaggccctgccacaggagctgtgctagtggccctgctcactcgccctttgcgggtgggtagattagaatttccttctccaacagctcagaagagctaagtcaacagcccattgtttgctgtggctgtaatcagaaaaggattcctatgaaggctgccaagtggctactgcccactttttgtttactcttaatatccacctgcttcccaaagtgatctgctcctcccaaccttgggctgcactggggaagggcggtcgctagggtggggagggggcgagccccagaacccatagggcagagcatagtggctccatgtataggacacagtgaaagagatgggggtggcattttcttccaggagagttgtggggagatgaccgttaggtcataagcgcgcccctactctgcactggcgagaccagcaaagctggagtgaacccagctgaacctgggccgcagcagccccggaggctggaggcgctgcagtcgggaaacaccaggaggatggagcccttttccctgtaagcaggaggccaggatcctgattcctgagccggcttcccacggaccccaggccccggcagggtcctggcgggaggaagaacccacggagtgagtggggtgtcagcaaagcggggccgcagggcaggttctggaagcctctccgcgtggctgggctggagtgtgcagacgtgggagagcccggaatggggagcgcgtggccggtggaggcccgaggctgtgcttccgtcgctggctctgaggcagaggtccaggccggcaggctgcccaggtggtcctgtctcagagctctccggggcgcagaggcgcgggaagcggggaagggccgggcagcgagacgggtgtccccagcaggaggtcggggacccgtcgcgcgttccgtcggggccgcctgcggtgcaggggtcagagaccagccacgcgagcaagagggagcccggccagaactgctgagagcccccagcggagctgggactcaggggctccttgcgtttagccaccaagagtgggggcaggctgcggggtgccggggagaagccagatctcactcattttacaccgactaattagatcccgccgcccacctgggaccacggcattgtcatgtccgctgcactgacggggaaattgaggcacgggggcgagtaaggcgggagagggagtcggcgccgccgagctggggcgagccccgcacccacccgtacactcggcctctgcccctgctctgtgcgtgggctcctgctctgtgcgtggcctcgccgccgagctggggtgagccccgcacccacccgtacacccggcctctgctcctgctctttgcgtggcctcctgctctgtgcgtggcctctgctcctgctgcgtgcactgcggcatctcgggaaaccgggctgggctcctctgtcctctggaagctactgtaagttttagataaatgttactactagacacgaggaaagtgagtccatgattactggcattgaacaaatggttgcaccgcgttctccgtggtaggtggagtgtgtgattgtgagaggggaatggacactgaatccttacctacacaaatgcctaaactcgtaaggcattacgacacacccatctgaaaatctaattaagcggtaggaattctaatggtccgggatccaaatgagacccagccacttaacagttagcagccttcagttttgtcctgttgcccgtaattaccccaaggtcagggagaagcactgaagcaaaggcatgaacatcactttgaaaaagaaaggagttaatgggtgcagcacaccaacatggctcatgtatacatatgtaacaaacctgcacgttgtgcacatgtacactagaacttaaagtattatatatatatatatatatatatatgaaagaaacctgcctggggcactccttccttcagactccccttgaaagtattccctcatttcattcaaaaggatttaacttttctaaactaagtggtgctggtagaatatgctacctgatttacgtgttgctgtaattcttgaagctcttccaagacatcttggccttcctctgttccctccccttcctgctattttgcagacatatccactggggaattgtatggcaggaaggctgattttatttagctggcccttgattcttggtttgcacagtatctgggtccagcctgcagccctagggtccaggtaagttcatcaggaaaggatttctttacattcaatttaagccatctaggtcctaaaacaacgcttatattatctgtgggataatcctgcttagttatttgcaaaatagtcagatgtctatacagttttgggtaggaaaggggtaagccgctttcaaaattcattcttgaggaagaggctaaagaggagataaaagcagattttgaaattcttctgctggaactctgcaattggctgggaggagagagaaaaaccatagaataagtcataagaatagtgggctttttttctttttttcagatgtagtcttgctctgtcgcccaggctggagtgcagtgtcatgatttcagctcactgcaacctcgcctcccgggttcaagcaattatctgcctcagtctcccgagtagctgggattacagacatgggccaccacaccctgctaatttttgtattgttagtagagatggggttccaccatcttggccaggctgctcttgaactcctgaccttatgatccaaccgctttggcctcccaaagtgctgggattttttttgagacagagtctcactctgttgtccagactggagtgcagtggcaggatctcagctcactgcaagctccgcctcccgggttcacaccattcttctgcctcagcctcctgagtagctgggactacaggagcctgccaccgcgcctggctacttttttttttttttttgtatttttagtagaaacggggtttcactgtggtctcgatctcctgacctcgtgatccgcctgcctcggcctcccaaagtgctgggattacaggcatgagccaccacgcccggcctatgatggatctttttaagagagctttctagagaagcttatagattattttgcacaaattttaatgtgtacttttttttcctgatcaggttcatcatattcagattgtacacattttcatttttatggctatgctaatttacagtgcaggaaaaaaataactgtcaagatatgttgaagaaggctgggcgcggtggctcacacctgtaatcccagcactttgggaggctgaggcgggtggatcatgaggtcaggagatcaagaccatcctggctaacaaggtgaaaccccgtctctactaaaaaacaaaaaattagccaggcgtggtggtgggcgcctgtagtcccagctacgcgggaggctgaggcaggagaatggcgtgaacccaggaggcagagcttgcagtgagccgagatcgcgccactgcactccagcctgggcaacagagcgaggctctgtctcaaaaaaaaaaaaaaaaaaaaaagatatgttgaagaaatgtataaagtgtgtaatatagagagtgcatggaagacaatatattcgatgaaggcagcctagagctattttgactcttagatcgtcagatccgggagggcattcgtcctttccagtgcatgcaggaggaagctgaggctctgaggtttggaaacccaggagatatcactcagctgatttctagcaggtttacattaaatcttagttttggagagttaagaatcttgaggagtgataaccttggctgtagaattaaggatatgatgttcttggagaaaattaatcaggaagagggcactgggtgaccatttatcaagagattctttagcaaaggacagatataggtaaagaatcggagaatgagtcagaaataagtgaactaaataagaacactattttggggggactaaaaaacattaacttcaaagttatttgcagtctgtgtccctttgccctgaccatgccagtatgtctggctcatgcggtcacagcattctgcagaatgatggcctctattctctatacatacatatgatatcaatgtatagagatcttgtcttgatttgtccaaggcagtgactgttgtcgctttttacatatattactgggagggttgtatgcccagtgagtccccagcagctgtcactctggctgactacagatgtctgcaagcctcctcacttctgaagagcggccgcaccttgggcagcgcatgccttgaattaggatgtgggctcagctgtgtgtcaagaccccaaataacagtggcttatgcaagatagaagtctatttctgtttcatatgcttatgtcaaagatgtgctggcaggtctggtctgtggagtcatctgaggccaggggtttttctatccccaaattgttgccctccttcaaggagtcccacatggttcaccatgccatgcacacccccccacaggaagcgggaaagggcacccccttaccctttaaggccggtcattgcacacaattacacgtctcacttttgctcatccccatggcccgtaatctagctcatggtcatacccaggctgcaagggaggctagggagtgcagtctatcatgggcccctagaagcccagctaaaatttctattactctggatgaaggtgagaaggggtgttggagattactagcaactccacgaaagcactgacaaggatcagagttgatacccagtcaccttcccaagtgatggtccacacacagttggaaccaggatagtatttcttgcatgcctgcattgattcattcaacaaatacttgactgaaaataaggaagtagaaaaatgcagtcaccatcttcataaagctctaacccaggttggtgcctactaagtgatcattagtctaggtgtggtgtacagagtaagtggggactggggaggacagtaattcagatgagagagagagtggatgattgcagggaaagatgggagacagaagaggctcctagctctagtgccttctgggaaaagaccagacccagaaattaaaagtcaagagtgtaactgtagttgaactaatgaaactgagggtccaacccatagctttgtgagaggcacaaatgtaattttttatttttcaaaataacattaatataatttcttctatattccttgtgcaaatcctcaaccttctacattaaagaagaggctaaataggaggtataaacttgctaaaatttcttattaaaaaatagtgccaagcggccgtgtgcagtgactcacacctgtaatcccagcactttgggaggccgaggtgggcgaatcacaaggtcaggaaatcgagaccatcctggctaacatggtgaaaccccgtctctactaaaatacaaaaaattacccgggcatggtagtgggtgcctgtagtcccagctactcgggaggctgaggcaggagaatggtgcgaacccgggaggcagagcttgcagtgagccaagatcgcgccactgcactccagcctgggcgacagagcgagactctatctcaaaaaaaaaaaaaaagaaaaaaaaaatagtgccaacctaggtggtgaccacgtctctaatcccagctattcagaaggctgaggcaggaggaccacttaagcctagaagttcgagtccagcctgggcaacattcatgagactgtatctctataaacaaacaaacaaacaaacaaataaaacagaaatagtggcacaacttactttgctacgtatttgggagaacgcatattagttaatcaaaatcatttgctgaaggttgtctacatgctgtataaacaagctagatagactctacctacatcaaatatgcaaaactagtgaaataattacagaagagtaaccatttgcttccaggctggcttcttcttccctggagagcaaattggagtttatcctaacctgacacctttatgatcttctgatcattttattcctggaatagttgtactccacattttgaaaagttaaaatgaaaattatagaaccctcaacaaagtttggttgatggaatttcgatttgactgcttccggccacttctgagtttagcaaaggaggctcgtgtatattcttcatggaatttggctccaagaaaactcaactcaatttcctggaatggagcgaatttgtgacttcgaagggaagcatctgcatttcctttcccaaaaatactccatttgcattagactgctccctgtgacatttccaccagatggcaatacagtctttggatgacagagagtcttgctggttttcaaaatctctagaaatatttgtgtaggcactataaaaaagcattttttataaatgaaaagctcccataactgccccccattctaaagcaaccatctttatttgcatatattcactttgagtttttgtcaatattcatacagtcgtaagtacatttataatgtgcatggcattttagtctactatcaaaattcagcacaatgtatatcatttacatatttctacatgaccttcataattattgcagcagttacatactattacacatagtaaacctttcccctattgttacatagtatgtagtatgcacgttttcacctgttatagataatgctgcaggtaatggcacacaattggcacacagttttggaacattaggaagaattttagggatagcaatacagggtgaaagacatagatgtcttttgctctttaacttttccagaaagatgtgcagatttacatggctatcagcactgtgagaggatctgggttctgaccagttgcactatgcccacgtttttgttttacttcatttttttaaatcctaaaagtcaggtacagggtctttagcctgtaatactagcactttgggagactggcgggaggattacttgagctcaggatttcaagaccagcctgggcaacagagtgagacccagtctctccaaagaaaaaaaaaaaaagaaagaaagaaaaataggcaatggctcatgcctgtaatcccagcactttgggaggccaagacaggcagatcacctgaggtcaagagtttgagaccagcctggccagcatggtgaaaccccgtctctactaaaaatacaaaaattagctaggcgtggtggtggcgcctgtagtcccagctacttgagaagccgaattgcttgaacctgggaggcagaggcagcagtgagcagagatcggccattgcactccagcttgggccacaagggcgaaactgcatctcgaaaacaaaacaaaacaaaaccaaacccaggtgtggtggtgcatgcctgtagtcccagctacttgggaggttgaagcaagagaatcgcttgagctgggaggttgagactacagtgagctgtgattgcatgactgtacttcagcctgcgtgatggagcaagaccttgtctccaaaaattatatataaggaaaggacttgaaaatgcatttctcccgaactaggtgatgtttccgtgtgtgtggcccttcttcacagtggcctcctagaaaaacaagaccctgactcaaagaacacctctcactacagtaagacttcttggaatgctttacttttttaaaaatttaatttaattgtttaatgtggtaaaaaatatataacataaaacgtaaaactaaccagcttaaccatcttaagggcacaattcagtggcattatgtacgttctctttgttgtgcaaccatcaccaccacccatctccagaactcttttaaaatcttcccaaacagaaactctgtacccatcaaacaactcccatttccttctctcttcacctctggcaacctccatcctactttttctttatatgagtttgacggctctaggaacctcttataggtgaaattatccaggtctgtctttttgtgactagctggtttcacttcgcataatgttctcgaggtccattcatgttgtaacatgtgtcagaatttcttctctttctaaggctgaagaatattccattgtatggacctaccacattgcatgtatctatttatccactgagggacccttgggttgctatggaaaataatgcaactacgaacatggacatctgttccagtccttgctttcaattattttgtgtagatgcacagcagtggaattgctggatcagatggtaatgctatgtttgcttcactacttggaatgtgcctttatgcatatcgtgataaaatttgatctgtacgacagtcctgtgagataagtaagcattgatctctggttcagaaaagtgatttcttcaaagtgaaatgatgaacggaagagtatcctgaccttaaacttggctttttaaattgcccgttcaccttgaagagtggttccaatcacaagtgttaccttccaaggacagtgtcattctggttataatcagcttgctcccctgccctgagccttctgtccaagtttgtgcaggtgtgggtctggggcaggggacagctcatccatttcccactgcacggaacagaggctgtgtccagggccccagcaacaaagatttctcctttgggtttctgtttccctctttcagttcagagtctgtcatctgaaccatgaggatctggtggcttctgcttgccattgaaatctgcacagggaacataaactcacaggacacctgcaggcaagggcaccctggaatccctgggaaccccggtcacaatggtctgcctggaagagatggacgagacggagcgaagggtgacaaaggcgatgcaggtactcacctgacggcttcggctgcctttcaacttctctcttcattcctttcatctcattcactcatcatctgtgtgattttccacctacccactcacaccccatccatccatacatacatcaacccagcaacactcactggagcctgaccccattcatccatccacccatctgcccagcaacactcacggggtctgctccatgccagactctgtgccaggtgctggtggagagcacagggcaagatcgccatgacccctgccctcctgggttctctcatctctgacaccgcagaacattttcagtagtatacgatgtcatggatcctcccatctcaggtgacaggtatgatggatttttggcaacaaaaggctaatagagagatctgatcacgaattatttggcagcaagcacccagctgcagtgcaggtgagagctaataccgcatcatgccatgaagcaggagatgcggagtgacagatgacacaaaaggagacgagaatctgaaaccatacagctgctgcttatgcatctatatgacctaggttgggaccctgtcccagggtctggggatctgggggacaggattcagcctctgggagggagatttgccaaagctgagaagtccgagtggtttccataacaacaaccaatagacttggtttccgaatggggtaccattcttgaggcctggtcttgaccatagggtcacatatctaaggcatatgcagaatgatccatctgggttaagggcacagttcagtggcattacaaaaaaatatatcaaaacttctatggacctttttaaagataagtttgtgtttctaacacatctcagcttatggcatttggtggcctgatgatgttttgagtgggctggatgaagccaagggtcaccaggaagcaacattctttctaaccaccatcctgcacatctgctctgtgaggtgtcttctcctggctcacatctccagctcattgacactgttccagtccccaggtagcaaacagcccagtccaaatgaatagcaaaaccttaccattaatgaaatcaggtcttctgccctcacactgggaccacagtagtgtgtgtgtgtgtgtgtgtgtgtgtgtgtattgtatttctgaatatataagattttcattttttgttataaaattttacacacaaaaggagataaataggtgatagataaaaaatagaggacaaagacaaacactcctatattcaataccaaatttctctacctcttccctgttgaatttctctcctcttttctcaccagtgtccattctttcaagttttatatacttcttagaagcaaattatgtatctatttttctacgtagttcataggtattatatataatatatattacttcttagaaggatattcattcacattgctcacactaaaaatttacttcatttttatcttatcttaaagtgtatttttgtatatgttttataccaaacatattttccatatactacctgtgcataatgtagaaacatataaatatctactgattggggtctgtgttcatgctttgtgagttgtggttgcgtgatcatgaaagctcagaggccaccgctctagagaatgggagaaacgagagccaagcagggaaacaaaaagagggaaggagaggaagacacaggggagcagccagtggaggggaggggaggggaggggagcgcagggaggggcaaatgtagggataagccccctccattcagaggtcccacgctgaccaaggccccactcaggagcgctggtgtcccaggagaacagacatcgtgacagaaataagtctgcctgtgtcagtcctgtctcaggacctgcaagccggcccagcctgcccctgtcgccccacagccacgtcagtgggtctgaagtatgggagtctctgctgctttgtgagaagccagagtctggggtgagctgtggcccaatgagcactctactgccatagccagagccaccttcaacctgctgacggatagcacgccgacctggagctcaggggggcctgttctgagcacaaggacttgagtgtagtcagcagagccccactcacctgatgttctctgccagcttgattggtggcatttcccccagtgtaaggcactagagggatccttccagaactctctcttctatcttgggatagtgtcacgtaaccatagtcatctgtgttttcataggagcctagtaaatcttccgttccactctcctcaagagtaatggaagagaaacagagtgaggaaacctcctggcacctccaacattcagaccacgtcccaagtccttgtcgcaggagaggaacacaatcgtgacagtcagtccccattgcacacactccctcttcgtcctgtcttgctgtgcgctctaggcacgtcctagagatgggcgcttgggaagtcactcagttcatttcttaggtcacttatcccacgcagctcagcaccccagatgcccgctcatgcctgcctctctccacctgcgcttgtgtggaggacagagtgcccgtcagggcgggggtcacccccagactctccaacacacatggctgatggagaccaatggccagaaaaatcagaaatggaatttcaactcatgcctgttttctgcttttccacctaggagaaccaggacgtcctggcagcccggggaaggatgggacgagtggagagaagggagaacgaggttagtagttcctatttatggtgctctaattctgagctgtcgactatttaacaatattaccatggacaagtcctccatgctgattataatcttacaataaaggcaacacagttcttactctccagacggggggattctgcagggattggcaggctttgcagagggctgggtagtaaatattctcaactccgcaggccatacagatctgtcaccactactcaacttccccttgtagtgaaaagaagctgtagatgctccataaataagcatggctctgttccagtgacaccatatgtgtgaagactgaaatgggaatttcccatggtttccatgtattgtggaatattatttgtgaccatttaaacatgcaaaccatggccgagcaccatggcccacacctgtaatcccaacactttgggaggcccaggtaagagaatcgcttgaacctaggagttccagaccaccctgggcaacatagtaagactttgtctatacaaataaaaaaaaaattagctgggcattgtggcacgtgcctgtagtcccagctacccaggaggctgaggtgggaggatcgcttgagcctgggaggttggggctgccatgagccatgatctcgtcactgcactccagcctgggtaacagagtgggtgaccctgtctcaaagcaacaaaaaaacaagcagacaaacaaaacccagaaaaacaaaaaaacatgtaaaccatatttgtttagcttgcgggagggaggctgaatttggcctgtggctgtagtttgttgaaccttgaaccttgcagtggatgagcactgaggagtgagactgagtttttgacttggtgcatctggcagcactgcatggaggaggtggaactagaactggtccctgatgggtcgggatgtagtcgtagtggcaaacttgtgtaatcttcactttgtgcttttcatgtactgactcactgaatgcaatatccccagacgctaggtagttttattaccctagttccatatgtgagggaacagaggcacgaggctcactagctcatctgacgtcctgtgtgcatatggggacagaatggaaacctggcatttaacctcagagtccacacttgcaaccacggctctttggtatgggtgggggtgcaaggaagcagcaaggtttctgtagatgatgaattgccggtgggataggtgggttggggctggggttgggcaggagagggcaatgcctcgatgcaggctttattttatgttcactccagggaggaggtttttagaggatgtcacgactagggttgagtgtcagttaatctacctgtctctgctctgaagagtgctttctgtcatggattgacattatttaatggccagcatggtagacttagatggtagggttgtaatttctaacgtgagccctgacactaatttagtagacggtagtcaaaaggtgtgttgggatgtgtgtgtgtccatgtgcacacacgtgtgtaattggagtaattgattttcatttatttttattttttttgagacagaatctcactctgttgcccaggctgcagtgcagtggtttgatcacggatcactgcagcctcagcctcctgggctcaagccatcctcccacctcagcctcctgagtatctggaactacagttgtgcaccaccgcgcctggctaatttttgtattttttgcagagataaggtttggccatgttgcctaggctgatcttgaattcctggactcaagtagtctgcccaccttggcctcccaaagtgctaggattacaggcatgagccactgagctgggctggagtaattgaattttattttcttatttttctttttcttttttttttttagagtcagggtattgctatgttggccaggttggtcttgaactcttggcctcaggcagtcctcctgccgcggtctcccaaggtgctaggattacaggtgtgagccactgcacccagatggagtaattgaattttaaactctgggcatatactgaacctgtgcactactttgtttcatttgtgagctcaattatagaaaaaccaaagttgttcacaagggaatctttcacaagctatctctttatttgctctttctctatttaggagcagatggaaaagttgaagcaaaaggcatcaaaggtgatcaaggctcaagaggatccccaggaaaacatggccccaaggggcttgcagggcccatgggagagaagggcctccgaggagagactgggcctcaggggcagaaggggaataagggtgacgtgggtcccactggtcctgaggggccaaggggcaacattgggcctttgggcccaactggtttaccgggccccatgggccctattggaaagcctggtcccaaaggagaagctggacccacggggccccagggtgagccaggagtccggggaataagaggctggaaaggagatcgaggagagaaagggaaaatcggtgagactctagtcttgccaaaaagtgctttcactgtggggctcacggtgctgagcaagtttccttcttcagatatgcccattaaatttgataagatcctgtataacgaattcaaccattatgatacagcagcggggaaattcacgtgccacattgctggggtctattacttcacctaccacatcactgttttctccagaaatgttcaggtgtctttggtcaaaaatggagtaaaaatactgcacaccaaagatgcttacatgagctctgaggaccaggcctctggcggcattgtcctgcagctgaagctcggggatgaggtgtggctgcaggtgacaggaggagagaggttcaatggcttgtttgctgatgaggacgatgacacaactttcacagggttccttctgttcagcagcccgtgacagaggagagtttaaaaatccgccacaccatccatcagaatcagcttgggatgaacttattcagatggttttactttattaattcctccaattattacaataatcataaaaaggtgaaaatggaaaagttattcccaaaactgattctgtgtaacttactatttttccaggagtaaatatttaaaatagctgcatggtttattctaatttatttcacatttcttattcctattatctgaagaatccctcgtctgtgcgtttcttgtgggaagagtgttttaatatcattttagtgctctgaggagtcatatgaagatgtatccctcatctgtgtttctgaggacattaaggggaaattagagggaaatgtttattcaatttagtactagcaacagctttaagctggtgatgctgtcatactccagaaagctgtagacactgctcattttgtcttttaaaaaaattttattttattttaagttctgggatacatatgcaaaacatgcatgtttgttacataggtaaacatgtgctgtggtggtttgctgtatctatcaacccatcacctaggtattaagccctgcatgcattagctatttgtcctggtgctctccctcccactttgctcattttctaacctaggttttaatcaccattttacccaacaaatcattgttcgatcattatttgccagacttgaatctctatgtgttttctaggactgctctaataaagtacacaaactgggagtctttaaacaacagaaatggactttctcacagttctgtaggctggaagtttgagatcaccgtagcagcagggccattctccctccaaaggggatacaggaggatgcagccttgctgcttccagcttctggcagctggtggcagcatcactccagtccccgcctccatcttcaggtggctgtcctccttctgtatcagccaaattttcctcttcttacaaggacagcttccctaatctactatgacccatcttaatcatatctgcagctccttattttcaaataaggtcacatgtacaggttaggacttcagcatctcttttgggagacacagttcaacacaaaacaatctgccctctgattcccaaagttgatttccttcacctgtgcaaaatacattttcgccccatctcaacatttccaaaagtcttaacactttccgcgtcgagctttcctgagcccctctggtgcagccacctgcctgtcccatacaccccgcccaccatggagtccagagggaaatgagccagcagccccaaaccagacaccaaggcgcccaaagccaccaccaaggccaaggtacttctggcagacgatgggaaagcccgcttgaccaagccctcgaagaaggaggccccggccgagaagcagcagccactggcagcccccaccacagtgcctgccaagaagaccccgcccttctcaacaaccacagccacctgaagctggtccccacgggctccatggtccccagcagtcccgttgcaacccgggagcccaagggtcctggggacggggcggcggaggacgaggctgccggtaggtgtcctaggggccgaggtccctggtcctgcgagaacttgaggcccctgctgggagtggcctatgccgtggcagccatagccttgatcctcggtgtggccttcctggcctggaaaaaataatatccggggccaggtggtgggcacggagccacttcctgtagagacctgaggaagccagtgcatgcagaattcacccttatctatgtgtacacacggacattcattacacgtctatatatgcccccaacacatgcacacagtggcgaggacaccagggcccacccctgttgatccaggacttccccagcctccagggccgagggagtccatgctccagggtccacagtgccggatgccgggagagggcacagatgaggaactgcgagaaaggaatggaccctgtgtgggatctggcggtggctgggtaatcctgggcccccagggctggtctctgagtgcaggtgggggtgccgggatgggttctgcctgggcccaaccctcacggggacatcaaagggcatggttgtaaaaagaaaaaaaaaaaccacaccatcagattgcatgagactcactcatcatcacaagaacaacatgggggaaccacccccataattaaattacctccacccggtccctgccttgacacctggagattatggggattgcaattcaaggtgaggtttgggtgggg

SEQ ID NO: 578 - DNA, 308423 bp, Homo sapiens
  source 1..308423: mol_type = genomic DNA
ctagactggtctcgaacttctggcctcaagcactcctcctgcctcggttccaaattttttatgatgtgagcataacattgattctgaaaccaaacaacattagacattcaaaaagaaaattattgcccatctcatttttgcatatcaatgcaaagcctgtaaataaaatattagcaaacagaatcaagcagtatatttaaaaaaaaaagacaagtttattgcagggataaactgggtttttattaggaatttattataactaggactcattacttcaatatgaggaaatcagctgtcacccggtttgctcgtccttacagacatctccctcctcttcctctcttcctttccagtgaaaatgtcttcaagtttcctctaccaaaccaaaacttcaccccacttcttttattctttcctcctctcttctcagaacaaaggggttgttgctgaccagcccagggtttcttatttggggccggatcattcttccttgtggggcagtcctgtccttcaggtaggatgttgaggagcaccctcgtgtctacccacttaggcaacagtagcaactcccgcatcatgacaaccaaaaatgtctccagacctccccaaatgtacgcggggcggcgaggaggggcaacaccggccctggtcgagaaccgctagcctaggctcgcccctctacctgggcgccacaacttgccagggttggttattctccctggatcctttccttcctcctcatttgagcttcacgccctcaagtatgaccaaaggttctgtcattccactcctgcagttttcattaaggtcttaggccacttccatgtcaagaaacacagtggctctttctaacccctggccatgaggcacccctggaggaggagccgtgagggtagggaagatgctgagggggatgttgaccttgccgacttccaggcgcctccgctgcatcccggaggaggcgttgggcggtgagggtgcagcgggggggcgggccccgcaggatgaggtgtccgtgtgcggctagcgccacaggcaagaccgggctccttgcggggcggaggtgaggccgtgagcatagctctcaaactggagggcgcctcagaatcacttgacgggcttgcgagaatgtggactgctgggccccaccttcatggttttagtgcaggaaaaaccgaataggctgggtgggacggagaatctgcattttctcaagttcccagatgaggctgaagctgctggtccgggcaccacccttagaaaacctccagtgtagagtgcggaaatggggtccacatctggcttgggacgcccaaacatcgattatgtgcgaccagaggatgagcagatagggagatgagacactgagagctgggagagagggggcccccggccgccggctgaaggaggacggcgcaggcggcggtccgggtactacatctcccagcgagccccgcgcggctcgcgctcgccccctggcggcgatggctggaggcgccggcggagcgcgggtccctctcctgagcatcagtgagcgcccggagccgtggccgctgggggttgcggcggcgctgagccagcggggccggtgagtactagccgcgccgccagcccgcccgccggccggctctttgcgcctcagccgcgtggtctgaagggatgggcgggcgagcgcgggggtccggcagtccgtcgtgggggcacgggactgcctttctgggaaggcgtgctgcgtcttcgccgcgggggccccggtcccctcgtcgcgtgtcctgtccccagcccaggagggacgtcctggcctgtcctgcccggcccggagcggtgggaccggtgccgcaggtggcagcggcaggtggccgcctcctcccctccgggcccgagggttgtcgcagggacccgggactgagagccaggtggctcccgacagctgcggccctggaggcgaccccagccctcgccgcagtgggacaggtgcgcgggcacgcccggccccggctcctgggtctcgggagcctcccgcaccctccctgttgtgccttgggggtgctgcgtggtgcagaggaccgagaagcccttcgccctcggcgtccgccgcgctcccgccccttcctggccggggtgacaggggaagggctagggctgcgcatcccgggtcagctggggcgccgcggcgcagtgcacctggaaggcccgggggcagcgcgcggtgcccgtgggtttcccggtggtgcggacctgcgggcgtgcggaagtaacgacctccttccccagtgcccatgcaaggaaattagtgttatgtgcttgctttttttttttttttttcctaaggaagtttgactctgaatatcttattttgctggagctccatttgccagcacgtaagtttatgtaataagcggcatacagttcggaaaaaaattttcctgtgaaagtgctcttccttgccctctgcaggaagaattacgccgagctggttggcaggcttatccaccagcaactgtaggagctgcaggcagcagataaagtgttttttgagtaagggcacaagtcagcccttcaggacaatttttgtttttggaagattctgttatccagttccaaacaccgtgttatttcagtgttgaagatgggggaggagggaggagcacaggcttgtcaatcctaatacctcaacagaaattagctttgcaggattaactctccaagcaagcgagttgaatttggtagcccaaactacagctgaagctgagcctccatactaaagcctgtctcagttttaatagtttttcgcttgattcgtttgcctcttccaagtaggtgatcttattgtctgttaaacaacagatgtctctcatgtttttacttttttccttgtcttccatagattactctcgctgcagtgttgactattgaggttaaataggaatctttgtcttgggcttggttttagggagcattccctctgtatcttcaccgagtgtattctatcacattaagtacatttctgtttatgcctaattactaagagtttaaaaagtcaagggtgggtgttgggttttttgcccaaatgcttttgtgtagcatgcattgatatgatcatgtagattttcgtcttaaaattgttaacataagtggtggtcacattgctagattttctttctctaaaaccctgggctaatttaaaatgcacttttggattgttcacatcaataagctagcatcttatttagggttttggtatctgagtttggcatatagtttaccccatttttatctgtgttcataacaaggatcaggctgtcctctctgattaaattgggaaactttccatcattttctatgctctggaatagaagaattatctgttccctcaagtttggcagaacttgactgcagactgcctgggctgctgctggtgttgtttaggcagttaatatcagtatttaattaccttttcatttttttcatgatcatttatttttctcagtttttctgtttcttcaaagtaaatttaatattttctgttttcctagaaaatcattaacattattgaaatttaatatatgctagcataatgttgtatatagtattctggtgtaagaaaacagactcttacatatctgtatgtatctgtatgttctctttctgatacagtactttttttggtaccttttctctttttttttgatcagacttgcttaatgattattttattaatcctttcaaagaaccagcttttattaaccaggatttattgattaattctattgattttttatttttctatgacattaatttctgttttttatctttctacttaatttgagtttattttgttcaagttttaactgtttgaatggaaaacctggctcatttatttaatcagtcctgtgaacaaggcaaggacttctaattctttcattccacttacctcacatttggccttaattgtatttttacttcaacccttccaacgagacattattgctattgtttttgttattttctaggtcaacatttattagctttatctacctgtttaccatttcttcactttccattccttcttgtatcacagatacttttctttggaacatttttcttctccctcaagtacattctttagaaattacttcagcaatgatcaattttctgtttttgtaatatctgaaaatgcctttattctccctgtattctagaattttggtttcaccatgtgtcttctattgatttcagagttatttttgtatttttttatatttttaaaaagatgttttgtagctggaaggtttttaggatctctattctgccacagtgctgaaagaaaaacaaagattaagaacagattaatttgcagtccactgtcagtcacgactgttccctgaactcttagtatattgggtatacagttctatattaatctcaagtttattgatggtaattcaggttttctgcatccttaacttattttttttctctgtttgacctgttgatatggagagttgtattgaagactcccattatgattcttgtaggggtttttgtactatttctatgtttaatatatatttttctttaaatgttgtatttttgaagctgttttatgtgcttaaaggttcacaattcttgtatcttcttggtgaattgtaccttttgggaataaacgagccatcttatttaattttttttttgttcattctctttatattgctgtacttgctttttgttagcatttatatggaatatctttttctagtcactgattttcaattttctgtgtcttctttaattgttactcttaccattagcttatggctggattttgtttaattagttaatctttgtcttttaataaatattgtggtaaaataacataaaatttattatttattatttttatttttaccatttactacttttaagtttacagttccccagtgttaagtgtgtgcacattgttatgcaaccaatctccagaattttttcatcttacaaaattgaagctctgtatccattaccgcagcccctggcaaccaccattctgctttttgtctctatgaatttgcctattttaggtaccttgcatgagtatctaatatagtacctcatatagtatttgtctttttataactggcttatttcatttaatgtaatgccctcaaggttcatccatgttgtagcatgtgtcagaattttcttcatttttattgctaattaatattccattgaatgtatacaccacattttgcttatccatatatttatcaaaggatatttatgttggttccacatcatagctattatgaataatgctgccatgatcatgggtgtacaaatatctcttcaagaccctgctttcagttatttgggtatatacccagaagtagaattgttggatcaagtagtacttctatttttaattttttgatgacccagcatagtgttttccgcagaggctgaaccattttatattctcaccagcaatgcgtgagaatttcagtttccatacatccttgctaacatctgttattctctctctttttttgatagtagctatccttatgggtgtgaaatctttgtcttttaataggtagctttagcccatttatatttattttgattactgatcttttgcggattattcctgtcatcttattttatatttttgatttccttttttgagacggagtcttgctctatcgtccaggctggagtgcagtggcacgatctccgctcactgcgacctccggctttcgggttcaaacgattctcccaacccagcctcccgagtagctggaattacaggcctgcaaccactatgcccggctaatttttgtgtttttagtggggacaggttttaaccgtgttggccaggctagtctcaaatttctgacctcaagtgatctgcctgccttacccgcccaaagtgctgagattacaggcatgaaccactgtgccgagctggttcatttcattctcattgctgtgtatatgccattgtatatatccctaatatagatatacatttgactttgattggcagttggttgtttgcatttttggactattatgaatagtaagtacatgaacactctagtacacgtcttttgttgagtgagtgtgtgcatttctgttgagtgtgtatctgggagtggaactgcttggttgtagtctgtgcatgtgctcggttttagtagatactagcaaacagttttcagtaccggttgcaccaacttatttaccccagaagtatatgtggttgctccacattcttgccaactcttggtaatttctgtcttttaccttttagttattctggtggatactgtggttttaatttggattttcctgatgataaatgaatttgcactgttttggtacccttagtttttcacacatatctaaacatttttttctcttgctattaaaagataatctgtttatgtgaactctccatgagtaaagcaaaaaagaatcttatcatgattttaattctgtcccatattaaatttttgggttttcatacattatgcataaacagttatttaggtaaactgtaaatttttctgattatttactcatcattggtgcttttatttcatttgttttcttaatgagtccttaagtgattatttggttttgttttcagggattctgtgaatggtaaactttctgaacccttgcatgtttaaacaatgttttttatttcacttttccatgtgaatattcttgactgggtataggattctacgttaaaaccttctgaattttggagatattgctttatctgctggtatctaggaagaagtgcacgcgtctgactctcgtttctttgtagttaatgtttattttctctgaagctttacaattttttttctttctccttggtgttctaaaatttaactattatttgtctaggagtggattttttttttgagatggaatcttgctctgtcacccaggctgggagtgtggcatgatctcggctcactacaacctccacctcctggtttcaagtgattctcctgccttagcctcccaagtagttgggattacagatgtgcaccaccatacccagctaatgtttgtatttttagtacagacagggtttcaccatgttggcctgactgatctcaaactcctgacctcaggtgatccacctgcctcggcctcccaaagtgctgggattacaggcatgagccactgcgcttgggcaccacactggcttaagagtggatctcttttgttcttcctgctcagcatttggtagtccgtttcattctaaagattaatacacatttctatggcactggagaagttttgagtgtttccttgcctctattctattttctgcttctggaattattcttacttgggaattagaatatcttgatttatctttcatgtttcttgaaataagcatttttttctctcaaatattctgtcttttttaatttaattttttttttttttgagacagagtattgctgtgttgcccaggcctggagtgcaatggtgtggttcaatgtgacctgcaactcttggactcaggcaattcccctgccataccactgtgcccagcggaaatgctctctttatctttatgggctgcattctgggatgttccttgggctggttttgcaggtcaccaatctaatatttagatttgttccgtcaactctttagcccatctcttgagtgtttttaaatattgattatcatatttttaactttccgggtctctattttttttttttttttttgaggtggagtctcgctctgtcgcccaggctggaaggcaatggcactatctcggctcactgcaagctctgcctcccaggttcacgccattctcctgcctcagcctccccagtagcgaggactgccggtgcccaccaccacgcccggctaattttttgtatttttagtagcgacggggtttcactgtgttaaccaggatgatctcgatctcctgacctcgtgatccgcccgcctcggcctcccaaagtgctggggttacaggcgtgagccaccacgcctggccacgggtttctacttcttaaagtttaacttttgaaataggtaagataggcagggcgcagtggctcacgtctgtaatcccagcactttgggaggccgaggcggatggatcacgaggtcaggagattgagaccatctggctaacatggtgaaactccgcttctactaaaaaaaaaataaaataaaaaattagctgggcgtggtggcgattgcctgtagtcccagctactcaggaggttgaggcaggagaatggtgtgaacccgggaggcggagcttgcagtgagccaggatggcaccactgcactccagtctgggcgacagagagcgactccatctcaaaaaaaaaaaaaaaaaataggtaagataatcagtgttcaaaaccagactgtattaaaaaggcataaatgaaagtgagaggtgacagcgtgctggcagtcctcgctcgctctcggtgcctcctcagccttagtgcccactctggccgcgcttgaggagcccttcagcccaccgctgcactgtgggagcccctttctgggctggccaaggctggagccagctccctcagctttgcagggaggtgtggagggagaggcgcgggcgggaaccggggctgtacgcggtgcttgcgggccagcgtgagttcccggtgggcgtgggcttggcgggccccgcactgggagcggccggccagccggccccaacggccccaggcagtgaggggcttagcacctgggccagcagctgctgtgcccgatttctcgctgggccttagctgcctccctgcggggcagcgctcatgacctgcggcccgccatgcctgagccacccccacctcctgggctcctgtgcggcccgagcctccctgacagcaccaccccctgctccacggcgcccagtcccatcgaccaccagagggctgaggagtgcgggcgcagggcgcgggactggcaggcagctccacctgtggcactgatgccggatccactgggtgaagccagctgggctcctgagtctggtggggacttgagaacctttatgtctagctaagggattgtaaatacaccagtcagcaccctgtgtctagctcagggattgtaaacgcaccaatcagcactctgtcaaaatggaccaatcagctctctgaaaaatggaccaatcggttctctgtaaaatggagcagtcggctctctgtaaaatggaccaatcagcaggatatgggtgtggccagataagagaataaaagcaggctgcccgagccaagagtggtaacgtgctgcggtcgcattccgcgctgctgaaggtttgtccttttgatgtttggaatgcgttcttattactgctcactctttgggtctgcactgtctatatgagctgcaacacacacctcgaaggtctgcagcttcactcctgaagctagcgagaccacgaactcaccaggaggaacgaacaactctagatgcgcccccttaagagctgtaacactcgccgcgaaggtctgcagcttcactcctgagtcagcgagactacgaacccaccagaaggaagaaactccgaacacatccaaacatcagaaggaacaaactccagacacaccgcctttaagaactgttacgctcaccgcgagggtccacggcttcattctccaagtcagaccaagaacccaccaattccggacacaaaaggtgttcccaccattcctgtcctcttacttctctcgccttacaagtaggtaaccattgttgttagttacttatgtaccttccaaagtttcttcatgcaaatacaagcaaatatgaatcagattctccatttctccttttttgcacaaatagtagcattattctctatctggtcttcatcctgtgtttttatttcttggtatatcacaaagatcgtcacataccaactgcttgctctttataatgtccccttaggtcttcccaagaatatctaataatttcttctatgtgctctagtaattatctttgcttgggtttgtgttctgttgattcagtgtccctgtttcatcatactgaataaaaacttggtgattctttatgtgttcatcttcgaagtttgagaattccttttttcctgtcttactaggcgtagcgtgcctcctgtgattgttgaagagctgtggtgtgctgctgagtggcgtgtgtattccatgtgaggggaagggtccaacagtcctggtcattcagactgcagttccccaggtaatcaccttgtcaggttctacctctgctgttctatctgctgttacaagtctgttcctggaaacctgttaccatttccttctgcataacagcctcctcccaagcttgtattgggctatggtttgctcaggtaatctggttctgagtactttttacttttcagaaatttcctagacattttagttggccatcggcactcttgttttccaggtttcttttgatttagtgttttaaaaatgtttctaccattccattgaattttaagacacttggaaggcagaagtatgtgtttagtttattgttttggggacagggtcttgctctgtctcccaggttagagtgcattggcgcagtcataggtcactgtaactttgaacttttgggcttaactggtcctcctgcctcggcctcccaaagcgctgagattaccggcatgggccaccatgcccagtccttggtcttttataatttatttctgtgttgggggcccccaggaccatgctcagatctggtggttcacttggaagactcagcatgtggtgtactcacggctgtaatttattacagtgaaaggatacaaagcacaatcagcaaagggaaaggtgcatggggccaagtccaaaggaagccaggcacaagcttccaagcatcctctcccagtgcagtcacacaggatgtatgtgcttaactccccgaggaaggagctgtgacaacgcatgtgaaatgctgtctaccagggaaactcactagagacccaacacccagggtttttattgggggctggtcatgcaggccccctttgcccagcacataccacattccacgctacctgaagaaaagcaggagttcagcataaaccacacaataatttaggcacagtgagtccctctttccaggttggatggtgggaacccttctgaaatctaagttcccaggtgccagccaaggattaaccatgctttttatgagactttttaagaataacagtcttgggccaagcacaatggctcatgtctataatcccaacactgtgggagaccaaggtgggaggatctcttgaagccaggaatttgagactagcctggccaatacagaagaccctatcattcatttatttatttatttatttatttatttatttatttatttatttatttatttattttaaaaagcagtcttaggcctgctgtgttaactcttttctgtaagattttcctcctgtgttcctcagaaaaagatggacactttacctagaaatgacttctcccagtcagatggtcatgaatttttttgccttctctgaagagagaacacatttgtattaaggtgaaactgagtggagaacatttcctgatgttggagaaagccatagcatggcacgtgctcagcagccttgagagggtgtcagtgagagagcacagagggactactcaaccattcaaaattattttgaaaaggcaaggatccttttgaactttatctgcaaattccatgaggtgagaagtttagctcaatatagctggaaagttgagattgggttctgtgctgatagcaggaatgacacgaaagagctgaataaaaaatccacacatggtctttaattagccatatacagatggtagtggcccatcatccagctcagagatctgccacttctcttccagctttcccacggagccaccctgatcacccccatccatgttggtctttcttccccaaatggccatcagctctgctcacagggcctttcatcactggcttctttgtcactggcttcttttccgtggttttattggatagtttttgttgcctcattgtgtataatcttccacaagattgggaattccttgaggaatgaacagtaagtcatagttatataccccatgtctccctgcagggtgacatgcatagagctggtgcctattaatgttttcggaaagaaccactagaaggaagtaagaagcagccttttcttcattctagtcactgcttcacatgcagctgatttttattctgtgttgagggtggtgatataaaacaccacgctgacattacctgtttgagttgtctgagttctgtctgcagcagatggtgtaattaaatgttttagtttgaaaggcttttcaatttcattcaatctgagtgtgggcttagattgtcaaatcatcttttctaactctaaaggctgtatctagtcagcctggatctagtttcctccctttctctgtttttttattttttttatttttttgagacagagtcttactctgtcacccaggctggagtgcaatggtgtgatctcggctccctgcaacctccgcctcctgggttcaagtgattctcctgcctcagcctccagagtagctaactacaggcatgtgccaccacacctgggtaattcttgtattttttgtagagatgggctttcactgtgttggccaggctgatctcaaactcctaatcttgtgatccgcccgcctcagcctcccaaagtgctgggattacaggcgtgagcctccacgcctggccctccctttccttggttttagacctcaggtgtgaggaattgaattaattatattctcattcttagccctttatcatcactggcccatgcaagcccctctgttgttttgcttgttaatgcatttgttggtttatttgttcattccgttttatcccactctcattctcttctccctatagacagctattctaatgaggttcatataatacttttgtgtatatacagttgacccgtgaacaatgagggggtcaggggaactgattgcctgcacagttgaaaatctgtgtataacttttgactcccaaaacttaactactgacagcctactgttgagtggaagccttacccataatataaacagtcaattaacatttattttgcgtgtgatgtgtattatgtaccatattcttagaataatgtaagctagagataaagaaaatcataaggaagagaaaatatacttttcattagttccttggaattggattatcataaaagtcttcatccttgtcatcttcatgttgagtaggctgagggggaggaggaagaagaggggttggtcttgctgtcttgggggtagcagaagtggaagaaaatccacatgtaagtggacacaggcagttcaaacctgtgctattcaagggtcacgcgtatactgctttgtgtgcatctatttttaatttacatgaatggcatcatgttctagcctttattctgtatcttaggattgtcactcaccacccatctctgttacttggtgattctggtcttaatatccaccacattttgtccatctcgtctcctgtagatggacacccaggttgattcccactcccagtaatgctgaatgagcctcgtacatgtctccttatggacttgtgtgagaattctttgggatttagacccaggagtaggactgcctggtcgtggtgtgtgcctatacttaatataaccaagtactgccagattgctgtcaagggtggctgcaccactaccttccccagcagcacacaaggattcccaaggctctgatatatatatatataatataataatatatatatatatatatatttttttgtacttttagtagagaccgggtttcactgtgtcggccaggatggtcttgatctcttgacctcatgatccgcccgccttggcctcccaaagtggtgggattacaggcgtgagccactgcacccggccatcccaaggccctgatctttgcatgcgcttggcatcattcaactttctagactttagcagtctctctctttttatttatttactatttattattattataattataattattattatattttttgagatggagtttcactcagtcgcccaggctggagtgcagtggcatggtctcggctcactgcaatctccgcctcctgggttcatgccattctcctgcctcaacctcctgagtagctgggactactggtgcccaccactacgcctggctaattttttgtgttttcagtagagacggggtttcaccatgttagccaggatggtctcgatctcctgacttcatgatccgcccgcctcggcctcccaaagtgctgggattacaggtgtgagccactgtgcccggcagcagtttccctctttttatttgcatctgtctgtttactactgaatttgagaatgcttttatatatgcttgttatctttttgagtttccattgacataagttgcctgttcatgtcctttccccatgtttcaactggaatccaatatagactattttagacattagccccttgttgatgtttcgacagtgcacatagtttctcctaatatgttatacgtcagctttttggttggtatctgtgttggataagaatccttaattctataacctgaatagtcaatctgccccatgaacttacttagttttaccttttgacatgtctgttgacaacatttagtaatcaagatatttcacataaaaatccagattcctagtctctcttgaaagggtgaaaagtatttcagtcctggctagagtgactgaggggtgagctcctgctgttgctagggcctgggctgcctacccacctgtcctcactcattctcttgacctcctggccactagtgtcatttgactttatgaccagccactgctgtatgtgaggcaataccttaaggataaacaagcatggtgatgatgttcccaagattgcttggacatggttatggagtgggtggactcggcattgagaacacagtagtagctgctgcatctcatgacactattggatgggtgtcagcatggcagcagaatactgacggactgtgtgcacattctttcagcagtaatgattcattcttttcaaccttttctggatcggctcattcctttttgccaaaaaaaaccaaacaaacccaaaaaactatggtttagtgaaattgcatatgaacaagagttctaaacgagggatctgaaaactttttctgtgaagagctatagagtaaatattttaggctttgcagggccgtgtgttcccttggaactacttagctctgctcctgtagtgtgaaagctgctataggttgtatgtaaatgaacatggtctcttcatttggtctggatttgggctgcagactgtagtttctgatccatgttctaaaccatagtcttaagacttaattttgtcttccttctcttgtttttaaggtgcaaggttatacataacattttgctaatgaatacatggtaagtacctactaggtactaggtgctgagattatagtgatggacaagacacaaatccagtctattcagcttaatgtctgggtggggagacagatgagggagcaggcaattactaaagaggatggcaggccaggacacgggagagcacacaattgggcagcaggggttgggagcagggcatgtcaggtaagacgttctagaagaaggtgatgtctaaatgaagggggaagagggcgaggcaggataatgcaaaggtccttttgaacttcatctgcaaattccatggggtgagagtatagctggaaagctgagattgggttctgtgctgatagcaggaatgacaagaaagactctgaataaaaaatccacacgtggaatcgtgaatgcttaaataatccaaggttgatggtggtaactcctatgctattcaaatgtggcagaaaataaaaaaaaaaaacatggaaagcatctcagctgattttacaaagttaaaataaccctgatagagagcagtatatggatactgggggttggaaattttaaaaaaatgaaaaaaagaacagtataagcccgtagatgtaaactatagaccaaatttacgtgtgatgtgtatacaaatatcctaaatagcaaaaggaggtcagcagaatattaaaagagcaatacactttgacgaaatatattttactctaggaattccagaatcgtttgctattaggacatatgttagtttaatacaaggggaaagtttagtaagtttccattttatttaataaaatggggtagctatataatcgtcttgagagattctggaaaagcacttagaatttgacttcaaatcttgtcatttcttgaaacgttttcatgcattgtgccttcaggttgtacagcgtggctgagtttaccactttttaatttctctggcaaatctttgctgattatagcttttcattcatcacgtcctttgtgaatccattcttgtttactctatgcggaataaatttttctcttctcttctagtccagtaattctccattctttcatttcaattggagttttcagtttctctcaattgctttccttttttgagagacagattaggcactggagatacaaagataaataagatagtactcagggttttttctctttatcctctgattcattttctacccttccatatttctctgtctcagagggagatgattcctacaaacttcattttgcagtgttccttgtcactgtctctggccaagtatggctagtaggaagcactagtgggagattgaaaggtgggaggaagggagaagtcagggtttttcccccttgttttctgctttgcacagtgtctctagggtggtcccagctccagccaaggactctgacactggcttgtggactctgataatagcccctcctttatccttccagcttcatgggtggtaggtagatggggtcccactgttgctaatctctgggttggctcaccatcccaactggctttttagtcctgccctaaaccttgtaattagttcccatattaaattcctgctattgaactgcttctcttgaattctatttttcttattaaactttgcacaatgtagataaaaaccctacttctgtgtgttcacaatctcataggaaaagcggacattaaaatgactataagtttagcctagtcagtgttccctcttcccttcttttggaagtagacttcactttgtgcatagcaattggccatgacccagaatgagccaatcaaaatttggacatgggcacacacagagaaaagatgatgtgaagacgcagggagaagatggccacctgccagccaaggagagaggcctgggacagagccttgcctcagggccctcagaaagaaccagctctgctgacaccttgatctcagagtcctagtctccagaactgtgaggaaatcaatttctatgtttaagctccccagtttgtggtactttgttccagtagttctgggaaagtagtgtactacctgtcctcccagccccacccaaccactaatctactttctgtctctatagatttccctattctggtcatttccgatgcatggaatcataatctgtggtcatttgtgactggcttctttcacttagcataaggtttccgagattcatccttgtagcatgtagctggatgtcactccttgtatgggcagataatattctagtgtatggataataccgcatgttatttacctgttcatcagatgatgggcatatgggttcttaccacctttgctgttatgaataatgttgctataaatgcccatgtacaagtttttatgtggatatatgttttcatttttttggttatagacccaggaggaatattcctgggtcatacggtaactctgtatttaataatttgaggagctgccagactgttttccaaagtggctgcatcactttacattcccaacagcagcgaatgaggtttctgattttttcacatccttaccaacatttgttattacctttttattctagccatcctagtgcatatgaagtggtgtctacattctacattgtggttttgatttatatttccctgatgactagtgatgttgagcatcttttcgtgtctttattggccaattgtatatagtctttagataagtgtatattcaaggcttttacccatttttgaattgggttgttttgttgttgttcttgagttgtaggagttctttatatattataaatattaaatatttatcagatatatataatttgcagatattttatttcttccattatgtgggttgtcttaattttcttttttttcctttttttgttgacgtaataattatacatatttatgaggtacagagtgataatttgatacatgtatgcaatgtgtaatgattgaatcagggtaattaggatatccatcatcacaaacatttatcattcctttgtgctgggaacatccaaaatctcttctagctttttgaacatgtacaataagttattggtaactatactcgccctacagttctatagaacactaaaacttattcttcttacatagctgtaaatttttatccattaacttttcccaagcctccccttctaattctgtgaccccattttctttttagcacccatgtctgagtgagaacatgtactgtttatctttttgtgctttacttatttcattaaatataatgtcctccaggttcatccatgttgctgggatgacaggatttcattcttctttaatggctgaatagtattctattgagtgtatatgccacattttctttatccattcatctgttgatgcacatttagatttattccctgtcttggctgttgtgaacagtgttgcaattaacatgagagtgcatatatttcttcagtatactgacttctttcctttggataaatacccagtagtagggttgctggatcatatggtagttctattttcagttttttgaaaaacctcagtattattttccataatggccattaccaatttgcatccctacccacagtgtataggagttcccctttctccaaatctttgccagcatccattatattttgtctttttgatagtagccattctaactggagtgagaggatatctcatagtggtcttgatttttatttctctgatgattagtgatggtgagcattttttcatacttgttggctattttatacttgcaaggctcccagaatagccaaaacaaacttgaaaaacaagaacaaagtgtaggatgactcacacttcccaatttaaaaatttatacactaacaagtaatcaagacagtgtggtactggcagaatgatagtgacatttgtatgtcttcctttgagaatgtttattcagatcttttgcccatataaaaaccagattatttgcttttttgctgttgagttgttttagtcacttgtgtgttctggatactagtcccttgatggatggatagtttgcaaatattttctcccattctacaggttgtcttttcattctgttgtttcctttgctgtgcaggagctttttagtttaataaagtgctatttttccatttttgtttttgttgcctgtgtttttgaggttttagccataagatctttgcctggaccaatgtcctgaagcgtttttccttatgttttctaccagtagttttatagttttgggtcttacattcaagtctttaattcagtctgagttgatttttctatatggtgagagataggggtctagttttattcttctgcatatcgatatccagttttcctagtatcatttattgaaggggtgtcattgtcaaaaatcagttgactataaatatgtggatttatttttgggttctttattctgttccattggtctatgtgtctgtttttctactagtaccatgctgttttggttactgttgctttgaagtcaggtagtatgatgcctccagctttgttctttttgcttaatattgccttggctattttggctttccatttcttgatggtgtcctttccagcacaaaggtttttcattttggtaggtacaatttaccctattttaccttagttggtcatgcttttggtgtcatgtctaagaattctttgtcaaacctaacgtctttaagatttacccgtatgtttccttctaagagttttacagtcgtaactcttacgtttaagtcatcaattcatttttgaattaatttttgcatatggtgtgatggagggtccaacttcattttttttttcatgtgactatctgattatcccagacctatttgttgaaaagaatggtcttgttgacctttttgaaaatcatttgggctggatgtggtggctgatgcctataatcgcagcactttagtgtgatggagggtccaacttcattttttttttcatgtgactatctgatcatcccagacctatttgttgaaaagaatggtcttgttgacttttttgaaaatcatctgggctggatgtggtggctcatgccagttatcccagcactttgggaggccacagtgggaggattgcttgagcccagaagttgaagaccagcctgggcaacatggtgagattctatctctacaaaaaagaaaaaaaaaaagaaaaaaatagaaaagcacttaccatagatgtttaggcttgtttctgtactctcaattatattccattgatatgtatgtatgtatgtgtcttttgccagtaccacacagtcttgattactgttgctgtgtcgtaacatttgcaattggcaagtgagtcatcctatattttgttcgtgtttttcaagtttgttttggctattctcaaggtcttgcaattccatgtgaattttagaataatcttttcaatttcaacagtgaagtcatctgggatttttttttttttttttttgagatggaattttgctcttgttgcccaggctggagtgcaatggcacgatcttggctcactgcaacctctgcctcctgggttcaagcgattctcctgcctcagcttcccgagtagctgggattataggcatgtgccaccacgcctgactaattttgtatttttagaagagatagggtttctccatgttggtcaggctgatctcgagctcccgacctcaggtaatctgcgtgcctcagcctcccaaagtgctgggattacaggcatgaaccgccacccccagcctcatctgggattttgataaggattttgttgaatttatagatcaatttggagagcattgccagtaataagtcttttgatccatgaacatgggatagtttttcatttatgtaaacctttaatttcttttaacagtgttttgtagcttctagagtataagttttgcacttacttgaataaatttatttttgagtgtttttattctttttgatgttattgtaaattgaattattttcttaatctcatttttgggttgttcactgcaagtgtatagaaatataatagatttttgtatattggttttctatcctgcagccttgctgaacttgtttatcagttatcatagtgtcttagtagttcccttaggattttctaaagatcgtatcgcctgtaaatagagatctgttcttttttttggaggagtttgtgaagaactgatgttaatttatatttataagtttgaaagaatttcacagtgaaatcttctgggcctgggattttctttgtggatagtttcttggttgtcaattcagtctcttcccttgttatagctcattcaaattgtctctttcttcttgagtaaattttggtagttgatgttgtcctaggaacctgtccatttcatctaagttttctaatttgttggcacacatttgttcgtagtattcttttctaatccctcattagtaatgtcccctcttttatttctgattctagtaatttgagtcttacctcctttttgtcagtctagttaaaaggtttgttaacttggttgatcttttcaaagaactagcttttggttttatttatttttttccatttttctccttttgatttcattattttttgccataatctttattattttcttctttctggttgctaggaatgatatagctacaagccaaggagcacttagggttactgagaaccactggaagctggaagagacaagggaggattctttcctagagccttcacagggagcatggccctgtactcaccttgattgcaggtgtttagcctccagaactgggagaaaatacatttaagttgtgttaagccactcaatttgtggtagtttgttactgtaccctgaggaaactaatacaaacattttaattattttatttatttttttactgtatttatgtgagttactttttagtatctagggtttaacatgtgtgtcttaacttaccagaatatacttcatatttataatttaattctagttagataccaaaatgttattcctatgtagttctattgtcttcttccctttttgtggtatttttgtattatgtctattaatattacaaacccaaccatattattgttgtaattattatttttaaattttttaaaattttatttttaagttccctgttatattactttactatctgtagtaatttctttagcctagtaacagctttgttccaactctcttttgtgcagttatttgcaaatatattacaagtatatttctatatatgttataggttcaacaataggctttatatataatattttatgcaattgctttttaaatcatttcagagaagaaaggaaaaaatatgcattgttagtgtcatagttacagaataacctttactgctatgcttcaattttctgtgagaattcagattaccctctggggtcacttgttttcagcctgaagaacttcctgtggtgtttcttctaaggcaacaaattctctacttttgtttctctgggatgtctttatttcaccttcatttcctgccccccagcccttttttttgtggtaagatacatataaaatttaccattttaatcattaaacattttttgaaaagttttgtgctctcatgagccttggtcctgcacatctttctcctcctcagcagcaatctcgtttcctgcttaattattttttggttttgctttttgtttttgtttttgttttttcgagacagaatcttgctctgtcgcccaggctggaattcagtggcgcgatctcgactcactgcaatctctgcctcctgggttcaagcaattctcgtgtctcagtctcaccagtagctgggattataagtatatgccaccatgcctggctaatttttgtatttttagcagagacagggttttgccatgttggccaggctggtctcaaactcctggtctcaagtgatcgcctgcctcggcctcccaaagtgctggcattataggtgtgagccaccgtgcctggcctcctgcttaatcatttttaaattttttttattttttattttttgagacggagttttgctcttattgcccaggctagagtgcggtggcgcaatctcagctcactgcaacctccgccttctggtttcaagcaattctgctgcctcagcctcccaagtagctgggattacaggtgcccgccaccacacccagctaatttttttgtatttttagtagagacggggtttcaccatgttaatcatttttaagtatactgttcagtagtataaagtatatttgtattgttgtaccaccctcaccaccatctgtctccagaactctttttatcttgcaaaactgaaattctgtacccattcaacaataactccacgttactccctccctcagcccttggcaaccactgttttactttctatctctgaatttgactaccctaggtatttcatacaagtgaagtaatatggtatttgtccttttgtggctggcttatttcacttagcatagtgttctcaaggtttagccatgttgtagcatgtgtcagaatttcattcctttttaatactgaataaattccattgtgtatacatataccacattttatttatttgtcgatggacccttgggttgcttctaccttttggctattgtgaataatgctgctatgaacatggatgtacaaataactcttcaagaccctggtttcaatccttttggatgtatatttttgaaagacagctttgtcgtatataggaatctttattttttttctttgagcacttcaaatatgttatcattcattgtttctgatgagaggtcaactgtttctattattgtggttcttttataagtgatgttcttttgtaagtgaggttctcttataagttttcctctagctgctttcaatattttctctgtttttgacttacagcatttttaccatggtgtatctgtttgtggttctttttgtatttatcctacttggaattcattgagtttcttgattgtataggttattgctttaaaacaaaaatctaggaagttactggccatcatttgaatattttttcttcctctttctcatctgcttccggtactctcagtatgcatatgttaatgtgattaatggtgtgccacattttgctgagattctgtttatttttcttcattcttttttctttttatttttcatttgaataatgtctattgaagtatatttgtctcactaaatttttcttctgccagttcaaatatagtgttgaaccttctctagtgaattttaaattttagttattctacctttcaactccggaatttccattgtattatattttataatttctatgcctttattgatattctctatttggagtaatattgttatgatactttcctttccttttttaatcacgcttttctttaattctgtggacatatttataatggttactccaaagtctttttctgttaaatctgataactgtttgctctcacttgcagtttcccttgtctacttcccccgtgataccccatcctatcataaccacagaaagtatggttcatacttccttgtttcttttcatgcttcatatatatatgtgtgtctgtatatatgtatatatgtgtatgtgtatatacacacacgcgcgcacacacacacacacacatatatatatgtatattttttttttttttgaggtggagtctcactttgttgcccaggctggagttcagtggcgtgatctcggctcactgcaacctctgcctcctgggttcaagtgattccctgcctcagcctcccgagtagctgggattacaggcatccaccaccatgcctggctaatttttgtatttttagtagagacggggttttgccatattggccaggctggtctcgaactcctgacctagggtgatctgcccgcctcagcatcccaaagtgctgggattacagacataagctaccatgtccggcctgtatatatatattttttggttggaaactggacttttcagatactgtattgtaggaactctgggtattggcttcccacttctggagcctcttgttcttatttgtttagtgactgcatagattattttaatgaagttgatttccccctgtcttggttcatttgtcttgctataaaggaatacctgaggctggataatttataaagaaaaaaggtttattgggctcatggttttgtaggctgtacaagaagcatggcatcactatctgcttctggcgagggcttcaggctgcttccactcattgcataaagggaaggggaaccagtgagatcacatggtgagagaggaagcgagagatgggggaaagtgccaggctgtttttaataaccagttgttgtgggaactaagagtaagaactcactcattcctgcaagaatggcaccaaaccattcaggagggatatgccacccccatgactcagacaccttccaataaggccccacctccagtactggggaacaaatttcaacatgagactcggtggggccaaacaaaccatatccaaaccattaacaccctaacagggttaaaccccttatgttgctcctcaaggaggtacagctttgggtgtgcttattgtcagcctcaaatgacagtgatattgatagggctctcttcctaaacagttagcaaatttaacagctgttgaactccactaattgttagctggttgctctatttaacaatgccatggagcataaaaattgctctaaatactaatacaattaaattctggctcctttaaatagtttctaaagtaagcgtttgatattcttttttttttttttcttttgagacggagtctcgctctgtcacccaaggctggagtgcagtggcacaatctcggctcactgcaacttccacctcccaggttcaagtgattctcctgcctcagcctcctcagtagctgggattacaggcatgcaccatgacacccggctaattttttatatttttggtagagacggggtttcaccatgttggccaggctggtctcgaactcctgaccgtgtgatccacctgccccggcctcccaaagtgctgggattacaggtgtgagccactgcgtcaggtctttcccccaattttttactaaaaaaatgtcaaacctacagaaaagttgaaagaataatacagtgaattcccatatacctttcatctagttgaccaaagtgctggaattacaggcatgagccaccacgactggccttatagatcttagtttggcatcaagtgtaagaattctttacctcgccttacatcccaaagattttctatttttcctttttttttttttttttgagttggagttttgctcttgttgcccaggctggagtgcaatggtgtgatcttggctcaccgcaacctctgccccccgggttcaagcgattctcatgcctcagcctcccaagtagctgggattacaggcatgtgccaccacgtccagctaattttgtatttttagtagagatggggcttctccatgttgatccggctggtctcaaactcctgaccttaggtgatccacctgccttggcctcccaaagtgctgggattacgagcgtgagccaccgtgcgtggcctttttctaaatgttttatagatgtatatcttatgtttagtccttgagtcattttgagttaatttttctgtagggtgtgaggttcaggttcatctttttgcctatagatgtgcaatgactctacaccctttaatgagagacatatcttcccccgttgaagtgttttaacacctttgtcagaaatcatttgggcatatttgtgtgtgcttctttcttagttctctatttggttgcattgatctatagctgtccctctgtcaatatcacagtcttgattactgtagctatgtaagtcttgaaactggatagactgattcttcccactttatttttctttttcaaatttgttttagctactctagttcctttgcatatttccgtatacatttttgtatgatcttgtctatatctatgtaaaatttttctgggattttggtagtaataatgttatcctgtgtaataatttggataaaattggcatctttactatattaagttttccaacctataagcatggtatatttcacgctatttaagtcttctttgatttcttttatcagcgttttgtagttttcagcacacaagtcctgcacattttgttagatttatatgtaagtatttcatttttttcaggcaattaaaaacagtatttattatgtttttaattttagtacccatgtgcttattgctagtacatagagatacaatttttttttttttaaatagagatgtggtctcattatgctgctcaggctggagcacagcagctattcacaggcacaatcattgtgcattacagcctcaaactactgacctaaaacaatcctcctttgtccagctcaattgatttttgtatgttcatcatatatcctgaatcctaaagacttactgaattcacttagtagttttagtgtttttaaaattaggttattttgctttttttttttgagacggagtctcgttctctcacccaggctggagtgcggtggctcaacactgcaacctctgcctccgggttcaagtgattctcctgcctcagcctcctgagtagctgagactacacatgcctggctaatttatatattttttagtagagatggggtttcaccatgttggtcaggctggtctcaaactcctgaccttgtgatctgcctgcctcggcctcccaaagtggtgggattacaggcatgagccactgcgcttggctgctttgcatttaagaaaagtcatgctttattttattttttttgagatggagtctcactctgtcaccaggctggaatgcagtggcacccagctcactgcaacctctgcctcccttgttcaagcaattctcgtgcctcagcctcccaagtagctgggtctacaggtgcacgccaccacatcctgctaatttttgtattattagtggagacgggatttcactatgttgaccattctggtctcaaactcccgacctcaagttttctgctcgcctcagcctcctaaaatgctgggattacaggtatgagccactgtgcctggccaaaatcatgtgtttttaaactgacagataaaattgtgtgtatttatcatgtacaacatgatgttttggagtaatatacgttgtgctaattaacgtatgcattacttcacatagttatcatttttgtggtgagaacgcttaacacccactcttttagtattttcaagaatacaatatattaagtatagttaccatgttgtgcaataggtatcttgaacttactcctcctaactgaaatttggtatcctttgaccagcgtgtctccactgcccccctacccctagttgctttacattttctatgagacaatcatgtcatctgcaaacaggaacagttttatttcttctttgccaatctgcaggtctttcatttccctttcttatcgttttgcacaagttagaacttcagggctatgttaaataagagcaatgagagtgaacatccttgctttgttcctgatcgtaggggaaagcatttagtttttcaccattaagtataggttagctgtaagcttttgtagtcttttgtaagctttatcaagtcaaggaatttcccctttattcttatttttcttattagagtatcatgaatggatattggattttggcaaatgcttttttctgcattgattgatgtgattatgtagttttcctctttagtacgttcatatagtgggttaccttgttttcaaatgttgaaccagacttgcgtttctggaataagtcccacttgatcatggtgtataattatttttatatattgcttctacttgctaatattttgttaaggagtttaaggagttttgtgtctatactcatgaaggatattggtctgcagtttatttttgtttttttttcctttttattttccccaccaccctgcctggctaatttttgtattttagtagagacagggttttaccatgttggccaggctagtctcaaactcctgacctcaggtgatccaccagcgtcagcctcccaaagtgctgagattacaggtgtgagccactgcacctggcccagttttctttttttatactgcccttgtccagtgcttcttttttttttttttctgactgttcctgcagagcagagctacccataggcagtgtgtcaagagtagctgtccttatacagttctagtatcagagtaacacccacttcataaaatgaactgggagatgttcccttctcttcagttttctcaaagatgctatgtagagttggtggtaattcttcattaaacatttggtagaattcttcagtgaaaccatctgggcccagatatttgcttcttgagagttaaaaacattttttaaatccttattcttcaaacaaagttctatttttctgaagatatttttcacagtacatacatctctttagctgcaaaataatttgtcgtttttatttgttaaggaagggtataattaccttatctaatatttataaaatattaagtttaatgtttctgttttaagagtgttaaaattacaaattcaattttctcagtagttatcaggctatcccaattatctatttcatattgggtgagttgtggtaatttgtgttttttcagtaattagtccatttcatctacattgtcaaatttataatgtgtagagttgtttctaattatgctttcattctaataactggtaatccgtgtcttctttcttttttgtttgttagccttgctagaggtttgtcaattttattaatctttcgaagaatcagtactttgtttcactgattttctttattgtgtttctgttttcaattttactgatttatttttatattttctttcttttgcttgctttgggtttattttgctcttcatcttctgtgttcttgagatgggagtggagactattgatttgaaactttttctcttttctaatgtaaacatttagtgttataaatttccctctcagcattgctttaactatgtcccacaaattttgatattcttttttttttttttttttttgaggcagtctctgtcgcccaggctggcgtgcagtggcacaatcttggctcactgcaacctctgctgcctgtgttcaagcgattctcctacctcagcctcccaagtagctgggaccacaggctcccgccactgcgcttggctactttttgtagttttttagttgagacggggtttcaccatcttggccaggctggtctcgaactcctgatcttgtgatccaccagcctcggcctcccaaagtgctgggatcacaggcgtgagccaccgcacccagccatattcatttttagtcagtttatttcccttaagaaatttttaaaaatacattaaacaataaaaatgaatatcagaaatgaatatctttgacccacggatgattttagaaatgtgctgtccagttttcaagtatttggaggcttttctcgttatcctccagttacctctttctagtttgattccagtagagcacactctgtatgacttctattctttgaaatgtgttaagtttttaaaaagcgttagatataatccacataccatatgtttcacccacttaaaacgtacaattcaatggccttttttatatttgtagagttgcgccaacatcaccacaatcaattttggaacattttcattatcccaaaaagaaatcctacactctttaactgtcaccttctccctccccatgcagctcttccactgtccatccaagccttcggcaatcactagtgagctttgttttatggcccagggtagggtctaaggatatgttcagtgaatacttgaaaagaatgtttattttgctattgttgggtagagtgttccgtaaatgtctattagatcctgttgttcagtggtgttaagttcttctcaactccatgctgatttttttgtctagttgttctatcagttgttaagagagggtgttgaatctccaagcagaatgattgatttgcctgcttttctttcaggatcttttcttgatccttttattcctgtctcttgaaattttcttttctctgaagtctattttatgttattaatatagccactcctttcttttgattaatgttttcatgatatattttattcttttaatttcaaccaacatatgttggtatatttaaagcaggtttcttttttgtttttcaactgaggtggagtctcactctgtcgttcaggctggagtggcgcaatcttggcccactgctacctctgctgcccgggttcaagcagttcttgtgtcgcagcctcctgagtagttgggactacaggcgtgtgccaccatgcctggctaatttttttgtatttttagtagagatggggtattaccatgttgtccaggctggtctggaactcctgacctcaggtgatccacccgccttggcctcccgaagtgctgggattacaagtgtgagtcactgcactcagcccaaagcaggtttcttatagctatgtttttaaattaactctgctatctctgtcttttaattgatataattagatcatttacatttatgtaattattgataagttagggcttaagtctaccattttatttatgtttttaaaaaatttagtttgtcctcctctttttttctctttttgtcttgtcttcctgtagagtatttgaatattttttagaattccatttcaatttatctaaattgtttttggttattatctctttgtatagtgttgttagtggttgctgtattacattatatgtatatatatatatacacacacatatacacacatatatttatatatacttacgtgtgtgtgtgtatgtaacttttcacagtgttgtcattttaccacttcaatgaggtatagaaacctatactttccccatttataattctctgcatacatttagtagaagcacttcagacagggttataatttttgcttcaaccatcaatataatttagaagtcttaagaggagatagaaattttattgtaattacatgtatttttgcttactatgttatttctttcttcttgatgtttctggattccttctttcatcattttttggtctgttgcatgatcttccttttgccattcctttaggggagatctgctggcaacatattctcttattttgctttatctgagactgtcttgatttcccattgattcttgaaggatatttttactgaatctagaattttgtgttgacacttcttttctttcagcacttgaaaaccattgtgtcatttccttctggcttccttaatttctgtaagaaatctgttacttgaattgtttttcccttatacatgaagtgttgtttcactcactgctttcaagacgttttctcttttcgtcttttcagaagtttgactatgatgtattttggtgtggattttattgggctttttatttggggttcagcatttcgaatctataggtttatgtctcttgccaaatttgggaagttttcagctattattttttgaatacgtttccagctgtgccatctttgtctctttcctggaccctgatgacaagtgttagatcttttattttagtctcagaggtctttgagactttctccctcactccttccctccctccttcccttccttccttcctttctctttttccatcattcctcctgctgctcctcttttttcttctttattttttggccagtctattttctttctgttcttcatattgggtaatttctattattttctgttgaagttcactgattattttgtctgccccctccattctatgttgtctttccattcaatttggttactgtatttttcaattctaaaatttccattaaaatatgtatctatttttttgagatggagttttgctcttgttgcccaggctggagtgcaatgtgcaatggcgggatctcggctcaccgcaacctccacctcctgagttcaagcgattctcctgcctcggcctcctgagtagctaggattacaggcatgtgccaccatgactggctaattttgtatttttagtagagacggggtttctccatgttggtcaggctggtctcaaactcctgacctcaggtgatccgcctgcctcagcctcccaaagtgcagggattacaggctgtgagccactgcacctggccaaaatatatatcttttatttctttgccaagatttttttttcatttgtttcaagcacgtttgtagttgtttgttgaggctttttttttttttttttttttttttgggacgaagtcttgctctgttgcccaggctggagtgcggtggtgcgatctcggctcactgctcctcttcccaggttcatgccattctcctgcctcaggctcccgagtagctgggactacaggtgcccaccaccatgccttgctatttttttttgtatttttagtagagacggggtttcaccgtgttagccaggatggtctcgatctcctgatcttgtgatccacctgcctcggcctcccaaagtgctggggttacaggcgtgagccaccgcgcccagcctgttgaggcttatgatatgtgctttaacatcctttcaggtagttctaatatctgtgctctcttagtgctagtgtctgtcaattgtcttttctctctttcagtttgggatcttcctgactcttggtataaatgatcctcaatgaaaacttcaacgatttgggtattacgttatcagactctagaccttatttaaacctgttttgaacaccattgtagtagaagaagggggacatcagcttgttacttctagatgggggtaaatatccaggctttccgctctgcttccattgacacccaatggggtgggggacccctgttgctgctgggtggttgtgggtattctggttccctacttggcctccctgatacctccctggctaggaggggtaggagtgcctactgcttgccacagtgctttcactgtcaccatgggggaagagggaggaaaggtggcctcattatctctgggaaaaggttaagtcactgaatctccactaggcctcctctgacatgaccccagcagggagggcctcatcactcctgggtgggagtggaagtccaggttcccctgacactgctggcgggtgagggatgggctccttactactgccatgcagggataaaagtcgcagtccttactcagccttggtgggggtgttgggtaccttggtacgtcctcacaagactggaagtctaggctccctgctcagttattgctggtaaatgggcagttactgtctaaatgtgttccatctcattagactgtctccttcctggtcctttggctagagagggcaggcttttcttggggcttttcaatctgtgccccttggtgttttgaagttgcctgctgcttcagctccaagtctgagataatgaagcaaaaagaagacccagtgaacccatcactgggttgttctgtgggcctcaaggcacctggatagtctgcctcctcttccccttccagaaccttcttatatttgttttatatctagtgttgagggtttttattaccacttactgggaagaacagggaaaagtatgtctgctctgtccctggagctcaagtccacaacttgcttttcgtttgtttttaaataattagttttgtttttaaatgaaactgagttttctttggagaggccaagcaagtttctttggagaggccaagcaagttgtctggtggagcgtctcatggtcagaagctgtccagttcttcccttgtgattagcttcaaacagttttggcgagaagctgtgtgggcgatgctgtgtagctcccacatcacaaggaggcacatagtgttgtggggcctggctgggggtcacaggaagcttgatcacatcttccttcctgtatctaataaattatctgtggtgtgaaactctgagatcatgtgagcatcctcttcccaagcagccttttactcagtggttttagcatgtctaggtgaatatattaaggtttacaaaatgataatttttctaattctctcatttcctttacatttattagctggtattcttccatgaagaagagctttatccaaagccacatccttttgttctctttttagtaccaatatgtattttaattcatgttttataattcattactgtcatgtttttcttgaaattgttccacgcggggcaaagtgagctccttctggttcactcttaggtccatttaacatgactctgttaatctttgggcagttccttgatttctgggcaacatgggatgtcccagactcaccattttcatttcatagtccacacctagaatcagctatttccccaaggagccctgcttccttttagtaaggaatggtatttagaaatgcaaataaatttccaagggagaagagttttctaagggaagataaagtattgaattatagtagttactcgtagtcacaactgctactgtattcttggtgacttaggccctcgtttgaagttagggaggtagagcttcatgtgacagtgatttgtgtgcctgtgtctcctctatctggctgactttcttgggagccaggagagtatcttttcaatttttatattcacagtatttagcactgtttctggaacagaggaggatttaataactatttggacttaaattgtgctaaacagactcctaagctgtgcatcatagaatccaagaatttttctaatgttctgcctgtgtggagaagagtaaggatcttctccacacagtggagaacatttctcacagtggaaatgttcataggccctgggcagattattcagtgtttcagaacttgtttctcttgctgaatgggaagcattttattggcttcagcatgctaaaaaaaaggctataacaagatctgaggctgttcttacgaggtagtggtaaagtatgggtatgggattcagtttgaacatttagagaaggtgactttgtaatctgtatatagctcaccctggaggtgaatggtactggttttcagcctctacttgggagatgtgtgtttcttcttttgctgactctgctactatatagttttatgacctttaagtcagtcagttgctcaatttcttttccttattttcatctggaaaagagcgtgatggtgttttgaattaagatataataagaaaaacatataaaacccttggatatgtagcaataaaatgaaagaagatgtattataagcacagaacttggccattatgagtagcaacaaaggaagcctagtgtcaggtcctagggtttgtttttatttgaaggagctgtatgtggcattttaataagggttccaaatgaaagggtagtttcaggctgagtctagctttgagactataatgataatgggactgtaaagttatattaaagtgggtttaggcagaaggcacatgaaaagtacatttatttataaccgcattttgagtgaagggatagaacctaaaaggaaagactaaaatattcaacatggtatttatcaagtaaagggtgtgctcacgcacatgcgtgcatgtgtgctgtgtgtgtttatgatgaataagaactcttttattccatcaccatttgtttaaacatgaagtttaaagaaatgctttatttcctgaattttctttttccaaaaagtaattcttgcttggggtaaaaattacaagcagtatagatatacaacttagtaaaacatctcaatattctgctgatagttttgtttctgttctttcagatgttttctgtgcacacactagatttttttttccagaaattagctcatactgactatcataagcccatcctgctgctgcttgagtttgttttcacgtaacacacagctttttatgtccatctgtggacatccatatcactctttttgatggttgaatgatgggtacataccctcatgtacccagtatcctattgagacatatggattatttcttgttttttgctattataaacaatgctgcagtaaataccattttgtgtgtgtatctgctgtctcatgtactttggattgatatctaagagtggaattactgaaacaaaagttgtggatatttatgttttgccagttgttctaaagagttggttaatttgcagggctgaggattcctcatctcagatgacataaggttcttgttatactctctaagtgccctgagtttctctctcacatatggtggctgtaatcagtgggcattacaggtgcctttgagatggtgtgacccttccagggacatctgtatcccacagaatgtctaagttggtacatcctagctctcagcacgttcctcctactgagcccagacttggcagggttggccaggtgtgtgcttatagtttgtggtttgagactgtggcagtttttcctgctttatctgagatgatgcttttctaccctgtttatcagtagtgttttttgggctgggggaggtcacaggtgaggtgatgcaaaataactcctactcttgttttcaactggaaactaatttatatcttattttgttgtatctggcttttcctccccctctgttaattggaagatatgcttatctttctcagtttatcgacttgagaaagaaatcttttggttatacctttctaaaaaaaaaaaaaaccattagcatagtaatattacttcacacttcctgtaccttaatctccagtttttgtgacgctttgagaattcttttttaaaaatttaagttttaatttttttagagacagtttcttgccgtgttgcctaggctgagtcttgaactctggtctcaagtgatccttccacctcagcctcctgagtagctgggattgcagatttgagccacagtgcctggcagagtttttgttattattatcaaattaatattatttttacattattaattttttctttctaggcttcttaaaattatatctaattttctatccatagttaacccagaccatgagatttaattctatttagatttaattctgtgcctaactggaactggtactactgctagttcattcattgataacattgaatactctgaactatgccctgttctatgtcctagggataaagaaatgaataaatagacagaaatccctgcccctctggagtttatgtactagagggggtggcaaacaatgtaataaatgagtaagtcttagaatacgttagaagagaacaagtgctaaattgtaagaataaaagtggaatagggtgagtgaggtccatggggtcaaggggagtatgtagaatttaaatagggtagtcagggagggccccattgagatgctgacatttgagcaatgacctagagtaggtaagggagttaactcactgcaggtggaggaggcggccagagccaagactcaaggagtcgccttcctgatgtacaggaggggcagtgaggaggccagggctgctagggtatgcaggagacacgtcacaaggatccggagggcacgtggggtggggggtgggaagggctttgtagaccagtgcgcactggagggctctgacttgggtgttgatgtggtcactctgctatgctgagagcagactccaggggacaagactgggaggagggaaaggtgctgactattgcaggaaagccgggcgagagatgttggtagatgggaccagactgatttgaagctatgaagttcccattaatgagcacattaagtacatttaactttcagtgggctggattaggactacatttttcttaaggattcttgagtatgagaatgcttgtgttctttcatgttgtaaatgcttgtgttctttcatgtctttcatggcttttgcagcctttaaataatgcgtgacattctaacttggtaaagatgtgttgggtcactttctctcccttctggctcagtaggcagcattcttttgtcttcagactccagtgttctggagaagactgcagatggtctgcctttttccgcattatgggtcacccacttctttctctgtgttggtagaatcaccagccttgctagatgtgtcttgtgctggttggactctactgatttttcttggcatatgctaaaccctttcaagctatagattcagttactcaatttcaggaaagttttccggtgttatatcttaaattttcttttcctgtgccatttgttttgttctgttcagaattagcagttgtgtgtctgttggatctttatctctcgtatctaacttttttttttgagatggagtctcactctgtcacccaggctggagtgcagtggcgtgatctcggctcactgcaagctccgtctcccaggttcatgccattctcctgcctcagtctcccgagtagttgggactacaggtgcctgccaccacgcctggctaattttttgtatttttagtagagatggggtttcaccgtgttagccaggatggtctcgatctcctgaccctgtggtccccccgcctcagcctctaacatctttttaatcacttttatggatttcctatattccatttccccaaatgaatgtccgctttcactgacttcttcagcaattccacttcacttcttacccttcttcacgtaatgttcatcagataatggtgttagtgcttttctccattggtgtccttgactcatccgttaccttccttcagtaaggagcagggcccacagggaaggatattccttgctttaacctctcactaagctgagataaatttgaatacggctcaagatctagagaaatgagtctttttttttttttttgagacagagtcttgctctgtcacccaggctggagtgcagtggcgtgatctcggctcactgcaagctccgcttcctgggttcacgccattctcctgcctcagcttcccaagtagctgggactacaggcacctgccaccacgcccggctaattttttgtatttttagtagagactgggtttcactgtgttagccagtatggtctcaatctcctgacctcgtgatctgtccgcctcggcctcccaaagtgctgggattacaggtgtgagccactgcgcccagccgagaagtgagtcttgattcttgtcatcttccctcgattttgttcagcaaattcctgtctcagaaatagcctttgtgtttgttgctcagggttgaggcccttctctactttcattataggttgaatttccttctctgttttgactttaatagaaggggagagtagatattttttcttttgtaagaattcccagggccaggcgcggtggctcacgcctgtaatcccagcactttggagcctgaggtgggtggattgcttgagcctaggagtttgacattagcctgggcaacatagtgagaccctgtatatacaaaaattagcatgatggcacgtgcctgtagtcccagctactcaggaggctgaggtgggaggattgcttgaacccaggaggtcgaggctgcagtcagctgagatcataccatggcattccagcctggatgacagagtgagaccctgtctcagaaaagaaaaaaaaaaattcccagacatatcgcttaaaaattatcttttgtgaaaaataatatattacagtatataaaattcaacatgtttaacggggaaggagggaaaagaagattatcttctgcccctgtcccttagctcccagttcccagccccaggaagcacaaccatatagaacacattcctagagtggaattgctttgtcaaaggatatatgcacttgtacatttgatagacgctgccagattgctttccatagaagccatcagtatatatatgctatcagcaaaaaatgagagtgccagtctcctcacattctcaccaacatgatgatgtttgaagtttttcaaatttttgccattctaataggtaaaatagatttgaaagttttattttgcatttcctgttaatacaggtggttgaggagccaggtgcggtggggcacacctgtagtcctggtactatcatttgagcccaggagtttgagcctaacctgggcaacatcgtgagaccctgtctctcaaaaaataaataagtaaaagtcagtctgagcatcttatgtgccgaagagccatttgtattctctgtgaactacctgttcattacctgtcacatttttattttgggttagtggtggtttttttgttgggtttatataggtactctttatgtgtaggaaaattaactctgtctggatatgagtcaagttttgttttcccagttcattcagctatgattatttagctgtgtttgtgctatgttttaggcatgtagaaagatttggtttgtatgtaggtgattttctcttttataacttcagggtttttatattataggcattccccatcctaagagtccgaggattctacggtgttttcttctgctaattatactattttcatttttttcttttctttctttatttttatttatttattaatttttttgagttgaagttttgctcttgttgcccaggctggagtgcaatatctcagctcaccgcaacctgtgcctcccagattaaagctattctcctgcctcagcctcccaagtagctgggattacaggcatgtgccaccatgcctggctaattttgtatttttagtagagatggggtttctccatgttgctcaggctggtctcgaactcccgacctcaggtgatctgcccaccttggcctcccaaagtgctgggattacaggtgtgagccaccgcccctggccaatttttttcttttaaatatttggtgctcctcaccaacatggcacatgtatacctatgtaataaacctgcatgttgtgcacacgtaccctagaacttaaaactataattaaaataaataaatatttggtgctccttcagttactcctggtgttaggagtaaggtagggtgcccaactgtgtttttcctgatgcctatcctgctgtctgaacaccatttgttggttcctttggaatactagatttatcgtatattaaattcctgtatatgtttgaacctaattcttggtctagtccatgtctgtttgtctattcatgtaccaatatcaaaccttttaaaatttaggcttaaaatattttttaaaatgcaaattcaataaaatcattttggagagaagtcttattggaatatttcagtagttccttcacagtaagatgttgtagatcattcttctgagcacaatctgctattcattgttagggcatgtgtttagttacctactttgaattgattttgctgaaagaagtaaggattcttgggtggtctttctatattctcctaccctggctccttggtaatgtggaaaatgaattttcaggtaaaattgtcagaggacagtaggatggtttttgttctggagtatattaacatgaactggcccaacttaggctcacatttgataacttcatgttagtaagcatcctcctttggttaaataaactggctgtggatattctccagggaaaaagttactagtaactcttagaaaactaatgcatacatgagctggtaaagaggaacttcttaaagcacaattttagagttatagaagcatatatttgttgttatgatcttgcaagtttgctaactgctttactgaaaatagcgtgcatggaaaaacatagcatagtaggtcccaaataagcacttggttctttctttctttctttctttttctttctttctttctttctttctttctttctttctttctttctttctttctttctttctttctttctttccttctttccttctttccttctttccttctttccttctttctttccttctccttcagacagagtcttgctttgttactcaggctggagtgcagtggtgcaatcttggcccactgcaacctctgcctcctgggttcaagcaattctcctgactcagcctcctgagtagctggggttacagggacctgccaccatgcctggataatttctgtatttttagtagagacaggtttcaccatgttggccaggctggtcttgaactcttgacctcaagtgatctgcctgcctcggcctcccagagtgctaggattacaggtgtgagccactgtgcccagctagcacttggttatttctttaaaaaatcaaatttaaattctgtcctgaatttgttatatgctttcttttaaaatgtatgtttaggtaaacatctgttttagggctttttcttcctttgaatttttttcctttatttgttcattcaacaaatattaattacttgctctgtgctagacagcgttttaggtactgatattcagcagacaaggatcttgcttttattgagtttataatctagtgggggagatcagcaataaataagttgtcaggatgtgattagttttatggagaaaatcaagtagggtggggtgaaagtgactcactttgggggcagcatccagtagcattagttaccttttattagaaaggcagcatgggaaaatagaagcatggacttcagagtttgatacgttcctgtacaaatctcagattttctacatgcaggttgtgtggccctgagcaaattacctaacctctctgacccccatttccccaactgtccaaaggggagagaagaatacctgactcatagtgggttattaaggattaaatgtgacaacttcaacaaaaaaaccctagaagaatgtttgacctgtaatagtcactttataaatagcagctaaaatattatcacttcatcactttattcattaaaagtttttaagaagtttctccattatttcattagtttcaatatcatgtgcctagtaagatggtaggttttaacaaaagcacccttaaatagccatttgtgccaaatgtcaccatagtgactgctaaaatgggggaaccgcaggtattactgtattcatttccatgaattgtcatagtttaatgttcatctacagttggtcatgttttgttgaggtcctaacagaaaaggaactacatttgtattgaacattgtattagaacaaattttaatacctctgaaaggtcatacatcaaagaatctagaccaaaaaccagagttctagctcagaaacaccagcactaccactgttttatctgtcccacattgaggaatatgacagactctggttcaaagataccttaacgccttatccatactactagaggcccaggctgagattctcctagaccacaggctgggagcagtgacatctccaagataccaagtctgtcagggtcactgatggagatttccatagaggaggttctcaggcctaactgaaggcatcacttcttagatacgtggcccaatcaaacactatccaaggaaggagcatggactctagagaggtttgggaacagggtagcagatatgccagaatgctgaaacctggaacaggccaggaagacaaaacagcagtctgcatgtagcaaaaagagaaggtaggaaggtacaggtaacaacaaaatggatttgaggtgagaatctcaatgtgaggtcacatctatattcctaacacacacagtttgttacctatgcgtttgccctagagacaggaccacactaaatagcacccattctttcttattttccttatccctcaaacaaagaagtgtccctctcttggccccaagtcaatgggtaagggattctgccaagacctttgtcaactatcccctatcatttatgttttttacctctccctgtctactgatttattctccctctacctcaaaacatgcttatatggttcctttctttaaaaaagaattccaccgaaatttcctactctgacctctaactcaatagttaaagttcctttcatggctcacttttcagggggaatctgactccacttcttttacctttcaattcctccttaattctgtgatcttcctctattcttgctaaagtcatgaccatctatgggtatgttcattgcctgttggacatttgaatgtctcaggcatttcaagttcagcattaattgaaccccctatccacttccacagtgtgatgatttttaaatatatccacaaattctttgacacttcttatttcaagaggtggagcttagttccctttctaactaatggaataaggcagaagtgagagtgttaggagtaggtccatagtgttaggagtaggagtaggaagaacactgtggcttcctccttgctctctctctcagatcactcatgctgagagaagccaactgccagatggggaggatgttccagcaatgctatagagaggctcacttggcaatgaattgagatctcctgccaacaaccagcactgccttgtcaggcaggtgagtgaactccttggaagtggaccctccggccccagttgagccttcagatgatgcaaccccagctgacatcttgattgcaacctcttgagaaactctgagccagaaccagccagctaagcctatcttagattcctggcccacagaaactgggagataagcctttgtgttttaagctgctaaatggttgtcagtgattggctacacaccagtatataaccaatacacacggcaaaccttccgtattcccagtcgtagggaaagcaaggaaacaactccttcctctccaagatacaactggtgatcaagtcctgttattttcatctaggtatctgttgattcagcctgttctgatttttctagtcactctgtcagtttattatttatcatctagactgtttcagttgcctcttaacaagtttcttgcctccagcttcactctcttttaatctattccccatactgccataaaaaatcattctaaaatgtgaatttgagcatctttcttctttgattgaattgtccccattgactagagttaatcaagcccagtcatcttaagcaatgcaggcaaagctgtttgaggtttcatcccaccatgctttccagctcctgtctctcctgcagcagggtgttcagccatcaaaaatagccggtgggtcccagaatctcccacggcttttcttctttctgtgatttggtgtgtgcagttctctctagttttggaaggctttcaccaactgtttgacgctttctctattttctgaaagttaggcattcctcctttcttctgcagtccccaggggatacctgtgtaattgctgtgatcacatcactgtcattgtttgtctctcaatgtctgtttttcagttagaccaagaatcccactagatgagggtcgatgctctgttcatctcttttttgttgttgttcttgcgtatctgatcttttaaaatgtttgatattctttttctttttttggggggggtggtgtcttgctctgtcatctgggctggagtacagtggtgcaatcatggctcactgcagccttgacctcctgggctcaagcaagcctcccacctcagcctccctaggagtgcacctccacagctggctaatttttgtattttctgtagagacagggtttcaccatgttacccaggctagtctcgaactcctgggcttgatattctttttttattttactgtggtaagaacacttaaccacatttgtggatctactacatttgttaatctacccttaacaaatttttaagtgtacaatacattattgttgactctaggtacagtgttgtacagctgatcttgagagcttattcatcttacttaactgcaacgttatgttcgttgattagtaactcctcgtttcccgccctgcagctccaggtaacctccattgtactctttgattctatgaatttgtctatttttggtatctcatataagtggagtcgtgcagtatttgtctttctatgactgccttatttcattagcaaaatgtcctcaagattcatccatgctgttgcatgttatagaatttccttttttttttttagaggctgaatagtactccatggtatgtatataccacatattgtctaccccttcatccactgatgggcatttagttgtttccacatcttggttttactctttgaggaacctgcatactcttttccacagcagctgctccattttacattctcataaacagtgcacaaaagttccagtttctctacatcctcaccaatacttgctgtcttttgattttttggtaatagtcatcctgacaatgtgcgttctgttcattttaagtctctagcaactaatgggatatttgaacagggtgtctgaaacttttagtctagcagatagggaatttcacattagcagagtcagaatataaaaatgtaactttacctctctatacatgatcataacttcactctctagccattgtttttcactaaaggcagtgaagagtctttggggatgagggttctggccccgtcactgatgctttcattggccatgaaggctttgctggttgttggtgccatccatttctctgtgttcccttttctctttatgttagtcccactgggccccctccgttctgactgtgagagttctccaggcttgcaggcttgtgctcagctgtttcagtgcctctctggagcatgcaccttgggaagtgctatgtgggtctcagacccaccctcctggtgcaggggcctgcttagggctgagcctctttaggaggactgcactctgggaagaaccaatgatgtgtctgggatttctgttagctagatctctcataaattccaagtcttagtttgggatggaaagaggtagaggatctggacttttcagagacttagtagcatctttaaaagaaaaatacttagttcttccagtggaaagctgtgggttccaagagatatctgctgtgcatttatgggcctattttagagcagaataccaaaatattcaccataattttaaaaataaatattaaataattaaaaaattggtacagcctgccaggagctcagtgtgcaatggtgacatccagcctgtgaggccacctggtgcggcttgggaacccgcagaagcctgcactgaagcccagcaaacccctcatcctagctaaccgcagcaaggactggcgtccggagaagggcgaggccgcttgtatcatggagtgtcagcttgctggaagccgaatgaattccgcgatgatatgtgcagaaaagagatccagggctttttcgattgtgcttcaagggattaggaagcctaaaaaatgagatcaatacaggagaccctgggagagtctgggagtttacctcccaataaatagagtaagttgtcatagaggtttcctaagacacctcacctaagcttaaaatggaaaagcattttcaatgatttctggactatagcttctgacaattatgcagaggcattttatagatgtttgcattgctgtgacctctttgaaggataagatgaggaaaaacactttttctaacctttggaatcaatagtatgggtagaagttatgttttatcttgaaataaaatcctctgaagagaaaaaaataattaaaaaattaattatacttgttttatatttataggagagatcttattgttggtgatctttgatagtatctatagcccaggacaaatttccagagcccttccatttctttccttattctgtttccattgaaatagaaagccgaaaccagaattagaggtcatcaggaatgatgatgagtgtttttgctctaactgatcaatctggatatgcattcagattaaatatggatgtagagattctagtgaaatttttttactgaaggccactttcagcattctttcagctgctgagttaacaagcatatcaaactaaaaaacagaaaggttggccgggtgcggtggctcatgcctgtaatcccagcactttgggaggccgaggcaggtggatcacgaggtcaggagatcaagaccatcctggctaacacggtgaaaccccatctctactaaaaatgcaaaaaagtagccgggcgtggtggcgggcgcctatagtcccagctactcgggaggctgaggcaggagaatggcgtgaacccgggaggcagagcttgcagtgagccaagatcacgccactgcactccagcctgggcaacagagtgagactccatctcaaaacaaacaaacaacaacaacaacagcaaaaaacaggaaggttaagtgttttttgtttgtttttgtttttgagacagggtctctctctgtcactcaggctgtggcgcagcatgaccacggctcactgcagtcttgatctcctgggctcaagcagtcctcctacttcagcttccagagtagctgggattacaagcatctgccaccatgcctggttaatttttttttttttttgtagagacagagttttgctatgttgctcaggctggtcttgagctcctggcctcaagcaatccacctgccttggcctcccaaagtgctgagattacagatgtgagccaccacacccagtccaagtgtttctatttagttgataatggtgagtagattcctaatccactctttgattgcatttgattctggaaaatgtttctttatatcattttgcagcatttcagtgtagtttttaaatatgccaatcatgtatcaaaaaatatatttctttaatttgtgaagaaaactgtcaactctcggggaagtcaaactcgtggagatttagctgcctacattgcagtttggtcatatcatcaaggtatcataacagcattaaaaaatcatggtattttggttaagattcaggctgttccagataatgattactgaaatatactacttgagtgaatcacctgagatcacagaaatggtctttatcagccttatcaaagtcatgaagaaacagttttttcctcattttaaatattcttcattttaaatatccttgcgagcacctttctccttagtatcacatgtatttcagtatggaaaagcagaccctgggactcactgtccatactgcatgttgaaaagcctgattgtccatgactgtagtgcgacttaaaatgtttatccagctgggtacagtggctcatgcttgtaatcccagcactttgggaggccaaggaaggaggatcacttgagtccaggagtttgagggaggatcacttgagcccagggtttgagaccagtctgggcaacatggtgagacccccatctctataaaaaatttaaaaattagctgggcatggtggtgcgtgcctgtagtcccagctactcaggaagtttaggtgggaggatcgctggggcctgggtgattgaggctacagtgagctgtgatcatgccaccgtactccagcctgggcaacaaagtgagaccgtgtatttaaaaaaaagtttattcattttttagcattgaatgaagattagattatttagattagcggtccccaacctttttggcaccagggactggttttgtgggagaatttttccgtgaactggggtggggggattgttttggaatgattcagccacattacatttattgttcactttatttcttttttttttttttttttttttgagacagagtatcgctctgtcgcccaggctggagtgcagtggcgtgatctcggcttacctcaagctctgcctcccaggttcacaccattctcctgcctcagcctctcgagtagctgggactacaggtgcccaccaccacacccggctaatttttttttgaatttttagtagacggggtttcaccgttttagccaggatggtctcgatctcctgacctcgtgatccgcctgccttggcctcccgaagtgctgggattacaggtgtgagccaccacgcctggcctattgtgcctttatttctattattattacattgtaatatagaatgaaataatgatacaactcactgtaatatagaatcaatgggagccctgaggttgttttcctgcaactagatgttcccatctcagggtgatggaagacagtgacagatcttccggcattagagtctcataaagagcggaaaacctacatcccttgcatgctcagttcacaatagggttcatggtcctatgagaatctaatgacatcactgatctgacgggaggtgaagcccaggtggtaatgctcgcttgcctattgctcacctcctgctgtgtggcccggttcctaacaggctatgaactgggggttggggacccctgatttagatcatcaactctgctctgaggaaaacagcagtgttgtagactggcatgaagtgcaacttcttctactctatgtagcaaccccttttctttctggtcctccttcactttagatccctgagacccttttccacattgtaccttggtcgttgtatatgaacatcaaacatgaaaggtgctagtgagatcccatctctatagaaaatttaaaaaattagctgggcatggtgggcctgtagtcccagctacttgggaggctaaggcaggaggatcccttgagcccaggagtttcaggttgcagtgagctctgatcgtgccactgcactccagcctgtgtgacagagcaagggcctgtctctaaaaacaaaacaaaacaaagcaaaacaaacatgagaagtgctgattcataccttgcaaagaggtttcattcggcagcaagttgaaattatctactggtttgtacatgagctagcacttcctcttccacatggcatgccattgatgttccttgatgtttagtgttatttgatagaggaatttgctaacaccttgttctcttttctctttgatgaaaatgtttatcattaactttggggctcttctaaagaatgttccattagtatgtgtttgtacctttttttttggcctctgaagagtgcagctttcaatgacgcctctatagttgtggtcttttccttttggtaatgaagtgcatcagttttgcactgagaaatgttattttgcccttgaggaataacttggttggtttactaaagagaccatcaaactttgaaagtgacatggaaagcttatgcggtttctacaactatttcagaagcttcataaatgctaaagcgtctgggctgggctcagtggctcatgtctgtaatcccaatgctttgggaagctgaggcaggaggtttgtttgaggccaggagttctagaccagcccgggtaacacagtgagactccgactctacaaaaaataaaaaaatttaaaaagaaacccacaaaaacaaaaaaacaatagaggactctgactttaggagcaaatgaatccagtgtctgataaattccaattttttaattattcaccattgtgctttctatgtgtacttcccttctttaactgcctgggtggtacatctcttgacatataggatatgtgtctttctggcttgcagtttagttccagtcaatagtgagcctcctaattgttcagagttgtatttatgccactcaccatgtgacttttatacttcatcaaatcattttgctctgtcaatccttctgaactgatgtgatggtacaaaatagaaaaagatggaaactgctaattttaacagatataaacataaacacgtacataaacaccagtgcatacatattacgaaaatatattgtgtaaaagcagtaacttgtaggactaagattaactactgtgttagtagtgcaagtatacatttcaaacttaatgattatataaagaatgaaacaggatatcagtgaccataatacctttaacatttcaaatttgtgaaatatatgtgaacaaaattgtttcatttatttctttgtttctttttgagacagagtctcactctgccacccaggctggagagcagtggcgcgatctcggctcactgcaacctccatctcccaggttcaagcaattctcctgcctcagcctcctgagtagctgggattacaggtgcccgccaccacgcccggctaatttttgtatttttagtagagacagtgtttcaccatgttggccagactggcctggaactcctgacctcaagtgacccactcacctcggcctcccaaagtgctgggattacaggtatgagccaccatacttggcccatttgtttcttttgaaataggaattcccagtgtagcttttgttgaacttccatgggcctctacatgtcctccatctgcaggttgtatgtacattgggctgtagccatttggtggcaaggaccatggtagaggccagtctgagagtgcacctggtagatccttaaagatgcaacctttgggaaccttgaacctttgattgctataaacaagtaaatcccctagttgatcatcactcaggaatcttggctaagcaaggcctatgaggaaattgatttcttgacagatacatttggaaggtctttaagttattctccttaccaatcacataaattttttaatgttttctataacttactgacttcagtcccatttttctttcatttattcaacaaatatgtattaagggcttgctgtgtgctaggcactctgaaagacaagacagcatttttgccctcttggaactaatgctttgtatatattattttctcctgtatcatatccagtttacactttgctacttacttttctatttttcctttttcttacctattatgtttcagatccataaactattttgtctatgtctttatttcaaattattttgtggccgggcacggtggctcacgtctgtaatcccagcagtttgggaggccgaggcgggtggattaggagatcaagaccatcctggctagcacggtgaaaccccgtctctgctaaaaaaatacaaaaaattagccaggcatggcggtgggcacctgtagtcccagctactcgagaggctgaggcaggagaatggcgtgaacctgggaggcagagcttgaggtaagccgagatcacgccactgcactccagcctgggtgacagagcaagactctgtcgtcaaaaaaaaaaaaaaaaaaattttgttctccagtctaaacataccgtaacagtcgtagcattaacctttgtgcattaaaacgcttaacatttccatccaaaaaatttcaggtatttttattttaaaattaaacaggttctccctctttcatccaggctgaagtgcagtggtgtgatcacggctcaccacagccttgaactcctgtgctcacgtgatcctcccacctcagcctcccaagtagttgggactacaggcatgtgccactgtgcctggctaatttttaaaaactttttttagagatggggccttgctatgatgcccaggctagtttcaaactcctgagctcaagtgatcctcctgcctcagcttcccaaagtgcttccccactggcatgagccaccataccaggtcaaaatttcacgtataacacaagaaatacattttttttttttttgagatgtagtctcaatctgtcacccaggctggagtgcactggtgggatctcggctcactgcaacctctgccacctgggttcaagtgagtctcctgcctcagcctcccgagtagcaaggattacaggtgcacgctaccatctcggctaatttttgtatttttagtggagacagggtttcgtcatgttggccaggctggtctcgaactcctgacctcaagtgatctgcccaccacagcctcctaaagtgctggaattacaggcataagccaccgtgcccagccaagaaacgcattcttataaaaagccaaatatatagatatagagtaaatatgaagtcactccttataattcccatcccaactgcctctcaagagccatgaaagagactattttctatatttttgctaatagtcttatctcttcttaaaatgttagtctgcaagatgggtttaaaaatacctcattgctttagctcatattggttgctattagatgggttaagcatcttttcttatgtttagcagtcatttggatttttgtgaattgccttttcatatcctttgccttttttctgttggactgtttgtttcttcttgagttaattttggtattctatgttttcctagaaaatgatctgctttgcctagtttacaaatccttatatgtaattacgttctctttcttgttcctaatttgggtaccttccttttttctttcttgattagatttgccagaggttctatcttgttagtcctttcaaagcatcagcttttcattttattaatcttcaaggtcatttaaaaaatgttttctgtttaattaattgccgtttttatctttattcattcttcatcctgctttctgtggactcagagaagacccgttcatgtagaggaaggtgggaacaaaggttcaaagatagttgtcgagggtcaggaaaacaattgttggcatcattctccttcacctcctcactcccaactgccatcacaaacacaggcagttcagaatccatcaagaaatgagtcaggaatcaggcagactgaatcagactatcagctttgttaataaggctgaagtagagagtagtgcttgacctaagatcacagtcaggctagtaacccttccctctgagttaaacttagccaacagaataaggcatttagaataaacgctttgagaggtttgaaaagaagacagttggaaatgaataaaacaatcacttagaggtgctgagggccaaatggcctcagggcagttcggtttttcagttctgtttggagacctagatcaggaacaaagaaaaatgagttggcagtctctggctggtggctgagtaagcagggccagagttggcagaaggaggtgatcttggggtttcagactagtcagtgaggcaagtgagaccagcagggcatggaaaaaaccacgaagagacaggagtcggggcttcagcttcttgtgagcatgcaaacccagctcggagggagtgtgatgctgggacagccaaaagaggagcagctgggggccagagaagggcattgcacatccagaaccctgatggcaggagagtcagagaacgggcacaccaccaagtgtgatgaaacttgtgggggattgacgatgagtcattcttcagactctctgggactcttgttctttccccaaattagtttaacatctgctttggaatcaaaagggtaactgcttttctctttctggctaattaaacaaatgcaaatgtatgcatagccttattgtatcctcacacagcctgggagggaagcacagtgtgggtggcaggtacatgacgctagaagcagagggtgtttagtgctggggtgggaggacagcaggaggatctgtcccagcgccagacgtcttccatccctacgggacctctcaaggtcatgctacatgaccttcggcatatgaattcacctggcaccacagtattgttcttaaaactgaaaatgtaccagcgtattgtaacttgtaagcccacaaacttcttgtttctagccatgtacttacagaaagcccttgcctttatgttttcacagggagggcatgatgaaccttgtcttatagctcatgagaaggccaacttcactaaccactccttgccgggtgtggtatgtttccctctgtaattacttctccctgtgtactttcttatggtaaaatgtcatgcttcagaacaaaattaaaaagtcatctaaagagatggtttggttatcatggaagtcaagttcctcttagtagaaatgagcagttatagtcagactttatagatactagaaagaagagcaatgtatttctaaactacatgcttgtgtcaaatttcagattttgtttaacaatttgtatattaatcatgatctaacccacctgttttggaagaaccctctcaaactgggtttttcctctgctctcacaccacaacaacagtcatcaacacggaaaaagacttctgtgaccaaatgtatgggggtttctctatagaagtagtggacaccagctaggtgttctccagttcaactctgacgctgtctacctggagagagcatcagatcccacagggcaaaactcaggccccaaggctgcctccttctccagtcaccagtctcaagtctgggcctctggaacttctgaccaactggcttcaagttggggttcccatgactcctctgggttcaactaatttgctggagcagctcacaaaactcagggcaacactaacttacattgatcagtttattataaaggatatcgcaaaggatacagatgaagagaagtgtaggacaaaggatggggaagggcatagagcttccacgccttccctgggtgcactaccctccagaaacttccaggtgttcagctgtccagacgctctctgaactgtgaccttttgggtttttatggaggcttcattgcataggcaccacaaccatgtagaaatgtgattggacaaaaagtacatgatctaaacctagcatgcctgtctcttcaagacttttcttggtctctctgtgtaacattccttcctttagggtatagttaggactctctctagtttgagggactcctgacccataattagagaagggtcctgtcttgggcacgtgaaaggacaggagaagttcagagagagagagagattctgtttcctgaggcctaaagtgccctgaaattataagaaggactataggcatcaggagccaggaaccggttctaatgcccatagtccttgttataatttgttatctatatctatctatctatatgtatatctatatctgtatctatatctatctatcagtcaatcataacaacataccatcagataaacaatttctatccatacccattttctgataataaaaactggatctgttgctggctaggtgaaactcggaaactcatgaagctttttaccttttttacaaatgggagtgtgccctttcatcctgaatcattagagtctcctaggtacccctctctgaggactcttattctaacagcctttgcaaaaattagccaaacatctgtttgaaactcactcagagtcattttcatctttgcctttctcctagttatttttagggttgataaatttgttttccaagagcaaacagagcatttttaagctttgatttttggctagcatttaggaattcttgttctgtgcagagctggctggatgcccacttaggaacttagcctgcacggagattccttcagtggaagagcattggtctggagtcatccatccggctcctggagcttggctaccctgatacttcccggtctccctgcaaatgaacacctcagcatgccattatagttggtcatcttactctgtttttacagaatccaggaggagagttcctgcaaaggatgtcttgggcagggtttaattatttctacgaataagaaagctttcctcaggtggaattgtatttactttctgcaatataagccatgaatttacaaatagagtctgatactgtcaggatacataattgttgttatgcttaagtagttttttttttcttgagatagagttttgcccaggctggaatgcagtggcacagtcactgctcactgtaccttcaacctcctgggctcaagcagttctcccatctcagcctcccaagtagctgggtctataggtgccataccaccacacctggctaatcaaattttttttttttttttttttggtagagataagggcttttatgttgcccaggcgggtcttgaactcttggatgcaagtaatcttcccgccttggcctgccaaagtgctgagattctaggtgtgagccactatgcccagccttaaatagattttaaaaaattacaaaactgttacatgttcatagtagacagtgtagaaaaatgtaaaaagcataaagaaaattaaaatttcctatcattccaccacctagataaccattctttcttttttcttttttttggagatgtagattccaatgatgtcatctcactgaaacctccgcctcccaggttcaagtgatcctcctgcctcagcctcccaagtagctgggactacaggtgcacaccaccacgcccagctgatttttgtatttagtagagacaggatttcaccatgttagccagactggtcttgaactcctgacctaaggtgatccatgcgcctcggcctcccaaagtgctgggatttcaggcgtgaactaccacgcccaacctaaccattcttaatatatagatttttttttcagtctttttatatgcctaaatgtaaatatgagctcctactgcatacactttacaatttgtattttccaccaaaatatattgtcgtcattgttccatatcactggatattttgtagtatcactttctctattgagatgccataaattcacatatatttacatttatataaatgtttacatatttataatatttttaacatttatagtatatatcatatttctatagagataacatgtattcacttatattcactgccataaaattcatacttttaaaagtgaacaatatggtgatttgtttgtatcttcacaaagttatacaatagttggcactgtcaaattctagaacattacccccccgccccgaaaacccagggcagttaccacccttccatcgctccttccctcatcctgtggcagccactcaagtactttctgtttgtgtgaattcccctcttctggacattgcgtagaagtggaattatacaatagatggtcttctgtgtgtggcttctcttttttttttgagacaggttcttgctctgtcacccaggctggagtgcagtgctgcaatctcagctcactgcaacctctgccatcctcccacctcagcctcccaagtagctgggaccacagatgtacaccaccacccctggtttgtatttttggtagagacaggatttcgccatgttggcccaggctggtttcaaacttctgggctcaagtgacctgcctgcttcagcctcccaaagtgctgggattataggtatgagctaccatgcccagcctgtgtggctccttttgttcaacataaggttttcagggttcatccatgtatcggtacattattcctttttactgatggataatatttcactgtgtggatgtacactttatatttatccattcaacagctgatggccactgggttttttctactttatggctactgtgattagtgctattgtgaacatttgtctgcaggttcttgtttgaacttctgttttcaattcttttggatatataccaaggactggagttactgggtcataatggtaactgggtgtaactttttgagggactccccaaactgtttttcacagtggctgtactttttcacatttacgtaggcaatgtatgagggttccagtgtcaccacatcctcaccagcacttgttaatgtctgttcttttggctagagccatcccagtcgatgtggagtggcatctcccagtggctttggtttgcataatgcctaatgattgatttttctaatgtggagcttcttttcacgtgcttgttggccacttgtattgtatagtctatttggagaaatacctgttcagatcctttacccacttttcagttgggttatttgtctttttattattgagttttcagagatctttacacattctagatactagacacttatcatatataggatttgcaaatgatttctcccattctgtgggttatcttttcattttcttttttttaacttattttaggttcaggggtacatgtgaaggtttatcacataggtaaactcatgtcacaggggtttgttatacagattatttcatcacccaggaagtaagcccagtacccaacagttaccttttctgctccctcctccaagcctccaccctcaagtgtctgttgtttcctcctttgtgtttatgagttctcatcatttagctctcgctaataagtgagaacatgcagtattcggttttctgttcctgcattagctggaggctgaggataatgacctccagctccatccatgtccctataaaggacgtgatcttgttcttttttatggctgcatgtcctttcattttcttgatagtatcttttgaagcaaaaggtttttaatttttatgaagtccactttatctagtttgtctttgcttacttctgcttttgatgtcatctctaagaaaatactgtctaatatagtcatgaagttttacagctatattttcttccaagaattacaaagttttagctcttgtactttgaggtgatttttgtgtatagtatgaggtaggagtctaactttgttcttttatatgtggatatccagttattccagcataatttgttgaaaagactgtctcccattgaattgtcctagcatccttgttgaaaatcaactgcccataaatttatgggttcatttctggactgtcaattctattccattggtctatatgactgtcttacatggacatgggatgtctgtttatttacttgacttctttagttttttcaatgacattttgtagttttcagtgtgtagactttccacttactcatacatattgataaatattttataattaacatttataaatattttatagttaaacataaatattttattctttttgatactactataaatgtaattggtttctgagtatatttggattattcactgcaagtatatagcaatacaattgatttttgtaagatcttgtattctgcagccttcctgaactcctttattagccctaagaggtttttttgttgtaaattccttatgattttatacatataagagcatgtcatctgtgattagagatagttttactttcttaccaatctggatgcattttctttctttttcttgcctaattgtccagactaaaacctctggtataatgttgacaagaagtggtgagagcagagagacacccttgtctagtttctgatcttaggagaaagctatcagattttcacgtaaagtacaatgttagtttgtgagtgttttgaacttgccctttatcaagttgaggaagttcccttttatgtctagttgttcagtgtttatattatgaaaatctgttggattttgtctactgctttttctgcatctatcgagatgatcatgtggttttgtcctttattctattactagggcaaattatactgattgattttgaccaactttgaatttctgggagaaattccatttggtcatggtatataatcctttatatatgtttttaggtttggtttgctagtattttgttgaggatttttctatatcttatctatatattttatctatatgacatctattatcacttttaatggctgcataaggcttaattatgtggatataccataatctaaccaattagactttaaattatttcttttcttgccattgttgttgttataatcaaggataagctcatcactgttgctcagatagctttgtattcattcatgattatttttgtaggatacattcctacaaatggaataatggaaccaaaggttatgcacagatgtttgtctcatcttgtcattgacattttcaagttgtttatagtggggtttttttttcagaggtttttaattttcaggtaagtcacatctgttttttctttatgtattctgcctttgcctataggctcagagaggcctctcctaccttattcaggataatctcctatattttctttcttttttctcttttaatttttcaagacaaaatttcactacgttgcccaggttgacgtgtggtctttcttctttttcagttttttgagacagggtctcactgtgttgcccaggctggagttcggtggctatttgcaagcacaatcatagtgcgctacagccttgatctcccgggctcaagcaatcctccctcctcagcctcccaagtagctgagactacaagctcacaccaactactgtgctcagctaaaacaatccattctttatcctagattagtcatgccatctttgtcataatctgaattcttatttctgggctttgccatgatccagtgctcatctttctattcctgaaccatgccattgtaattttttatttttctgatctattttactatctggtagtacaagtggtttgtgtttgtgtgtgtttgtgtgtgtgtgtgtgtgtaattttctcctttagagaagaatcaagttacttgatagcttctgtagagaataatcaattattctaccagatgaatttcaggacaattttataaataattttcttcatatttctaatctgattagaatttttattggaattacaacacatttataaaattgtttgcagagaatgaatatccgttgggagagcatggtatgcttttcatccagtcttcttttttgtcattcagtaaagcatgaatttggggggcgactgtaactttcttaccaggtttatttatagatgctattgtaagtaggattttttttaacgtgataacttatttaggtatattattttattatacagttgaatacatacttattttagaaaatttagaagctacaatgtgaatttaaaaagtaaatgacactcagtctgagagataagcactgttaacattttgtgtgtatctttctattaatagatttacagtctaatgagggaagtaagacatgatcacatgaaaggcttaataatctgagacactattgagtgactagcttgtactttttttctgcctagccttttttctccttttggaaactgcttttcccataactagtggagctgccaatcatccaggtccctctccacggccaatgggttggacagtgtatcacctcaggctcttttctgggagagactctctaatctggaatctcaaatgctaaagacctctagtcttgcagtgctgctgggcaaggccttcctatcctcagagcacctgtgtttgaatgataccagcttaggagagtgaagctacgaggtgattcaaaaccattcctgatgacatcattggacctcatggtctagagctggcttaaagccagcctgaattcatcctagactttcctaaatcagtaaagccaacaaactcaccattttgcttaagcaaaattgagttaggtgtctgtcatttgcagagtcccaaccactaccacctcctgtgtctgtgccatggtgccacatggggagtcacccagatgagttaggaccctgtatgccccttgccccccaggagagtgggtgttcctcagtaagagcaggttcagtgcattgtgcctgttgtctccttcaaggcaaagctggatggccatgagaggcagcagccttggccaggtggggcatggggctgccgtgccaggccaggccggctctgaactccttactgcactctgtccattagaatgacagagtctgagtatggaggttagaattatagtgaacatgggggattctatgtcacagaggctctgcaaacccatgccacctgctatataagagctctctgccatgcaagagcagactggctgccttccacacctattatccagtaaaatagcaattaaaatgcagcttgtggcaatgactaagcttagcccaggcccgctgatagagttcttggtgcctgtggatataacacatgttgcttgtttaccttcacaacatttcttcggtgtttttttctgggcagtgtatttggtccctgttgcagtagatcccattgtcactggggcttactctaggccatccgtagtagcagggaacgtggaccccaggctttgtgaggatgcccatatcattttggagctccctgaattcaaaattaagtatgaaaagatttatttagaacgaaaaaaaattgcaacaaattattggagcctaggagtttccgatgcctacctttgagatccctttagttggctcaccagaagcccctgctgtgatatgcttcctggttgtagcccgacttccccttcccacctagaactcacagtgttcacagggtcatggcaaggtggtggggcgtggctgaagcttcagggtaaatccatttgtgaagagcagactgagtttttgtttttgtttttaaatctgtttgatatctcagggagcagtcagcagctagccagcctacatcttgaaacccttacattttggagaggtacaaattaagcattgaggaccaagtaggatggaaatatgattttgcactttgtgcatgtatgcatgtaagaaagagaagagagagagagattgtgagaggcaggagagagacggggagaggccatcagaacttggggagagcagagcccgcctgcttcctgagtgaagcattgctcaagcgctctctgcccggccccctccgagtgtggttttcctcccaggccagcaccaaacccagaatagagtggctgacttgctgattgaggtcggcagctcccgagaagcaggagaagcagagtttttgcagtaagtacatcgttggttattatttaagacagagatggaaaatcttaggatagctggggaagaggtgcttctgctttaggtacaatgtcttacagacccagtggatcttggtgtgactaaggcagtgtgaatacattctcccgtggtgcatggactggataagttaatgccacatgcatgattttggggggctgaaaaaggatttgaaacccaccttttgacgtgttgaaagaaaatgatcttttctcacttgttttatcttgcaaggaaaggatgattaatgccaacttcaagttaatatatgaagttctttagaaaagaagccctgtgggtactaattagtagcagcgtggagattattttcccatccagggtgaatagggctgcttctgtgcattccttttgccaagtgtgggatgtctaaggtcctgtggagagaaccgcccactcgactagtgcttagcccctggaacgttctcgagtcatctccccttggaggagatcagcactgtagtgtgccctgtcgtctggcagagggtctgataatgtcgcaatgctcaacatctgggcaatacatacattgtgttagggtctgaaatgagatgtttgtgaagcccagatggcagagtttcaagcaataatatgataaagttggtggcttttctgggaagttatttattatatggttacttgagattgtttttcccccacatcccatcacagggctgaagataccttaaaatctctcttacccactctattttctagaaattaagtttttgctttttatttccttgtcccactgactctaatttcctataggtataaaatgtttagctcagcggtgcagaaggtccacactaagttttcttgggaaatgtggcttccaccccttctcgatagaatgctaaggtgctgctctagctgcagaactcactggtgtggctgcttctgctcctttacagctcagctccatggactctgtgtctctgtggttctgttttagagtagccgtgtttcacttcctttaacctttcctttaccaagtgagttaacatggaagcctgtctaaacagaggagcccccaaggcaggagagggggtgcaaaataagcaatactaaactttcatttgaaaacctggaatttgaaataaaccaccacctgtgaagtatcattcctcattccaattttatttttccaatatgttattttttttttagacagagccttgctgttgtcacccaggctggagtgcagtgtcttgatctcggcttactgcaacctctgcctcccaggttcaagtgattctcctgtcatagcctcccgagtagctgagactacaggcgcatgccatcacacccagctaatttttgtatttttagtaaagacaacatttcagcatgttgtccaggctggcctcaaactcctgaccttaggcgatccacctgccttggcctcccaaagtgctgggattataggcgtgagcccccacacctggccccaatacattaacatttttttaaatgatctaagtaattttgagctctcactgtacaacatcatctcatttgattctcccagcagccccatgaggtagctacctttttggtcttcacttaatagctgaggatgtggaggcctagagaggtcagagagatgggtgggcaggtaggtgagtggtgcagccaggatgggaactcaagtctgtctcaatccagagctcatgctctgatacggcatttcagtaaattcagaaattggagaaaatagtgacttaatcccacactttaaagcaactgttaaaatttctggattttttgctgggtgcagtggcttgcacctgaaatcccagctactcaggaggagaagaaggaggattgcttgagaccaggagttcgagaacagcctgggaaacatagcaaggccactgtctccaaaattttgtaaaaaaatttagccaggtctgggcgtcgtaggtcatgcctctaatcccagcattttgggaggctgaaacaggtagatcgcttgagctcaggagttcaagaccagcctgggcagcatagtgatacctcatctttacaaaaaaatcaaaacacaagctaagtgtggcgatgtgcacctgtagcaccagctactcaggaggctgatgtaagaagatcgcttgaaatcaggaggttgaggctacagtgagctgtgatcatgccactacatttcaccttgggcaacatagcaagaccctgtctcaaaaaactaaaaattaaaataagtaaataaataattagccaggtgtggtgttgcatgcctgcagtcccagctactccagaggatcactcgtacctaggaattcaaggttacaatgaactatgatctcactactgcatttcattctgagtgacagagtatgaccctgttctaaaaaaattatatatttctttctacctgtacaactagatattatagcataaggctttaaaattgttacatagtttcacaattattactatattattcttttgagacagagtctcactctgtcgcctaggctggagtgcagtagcgtgatctcagctcactgtgacttctgcctcccagcctcaaactatcctcccacctcagcctcccaggtagctgggattacaggcgtgtgccaacatgcccagctaagttttgtatttttggtagagatggagtttcactatggttcccaggctggtcttgaactcctgagctgaagtgatctgcctgccttggcctcctaaagtgctgggattacagggatgagccactgcacccagcctggtttgacaaatatttaatggcataaaatattttcttaagtgattggtccataagttatttaactattccctgttttttaaaattaggttgcttttccttttttgtgttttgctattataagtaatagattagtaaccgtctttgtccatggaactttccttatgtttttgggttgtatctgtagggtagattttcagatgtgggattactgggtaaaagggcatgaccattttaatggtgcttggtgtgtgttgctaaattactttatatcaacacagtgtgggggagcacttgtttaatttcatccattccaccagctgacagtatcatggggaaaaaagagtaagaaaaacagaaccagccgacagtatcacagggaaaaaagagtaagaaaaacagaacctctttatggtattttgcatttcttttaatacagctaggctgaacattttttacatgcttgtttacaagttgtactttctcttttgatcattttatgggatcgtaatgctggctttttggggccaatttatatgggtaagatttatttgccatatttttgtcagttattttccccagtctattgtttacctctttaaaatttttaaaaaacatgcagtcatttaacatttttatgtagtcaaattggtttcatttttttcgtaagtcttctatgttagagatctaagttctctgcttttaaggcatttatgttcttctagtattttctttcatggatgatgtgaaagtaaatttaaactggctttaaaaaatgctaaccagtttttccaatatcatttatgagcaactcttatgttttctaatattttatgattttctctttttatacctccagcttttctattatatgatttttctggattatttgattatttataggagcaatctgtttctacgccattatcgcactgtgatagcttttgtggcttttttttgtttgtttgttttgtttttttgtttttgagatggagttttgctctgtggcccaggctgaagtgcagtggtacaatctcgtctcaccacaacctctgcctcccaggttcaagcgattctcctgcctcagcctctcgagtagttgggattataggcacccgccaccacgcctggctaagttttgtatttttagtagaggtggggttttgcaatgttggccaggctggtctcggactcctgacctcaggtgatgcacctgttttggcctcccaaagtgctggggttacaagcgtgagccaccgcacctagcctgttgcttttatgatatgtagagagaatgagttgtgtggagtaatactgaggcaacataagattctggttaagcccataggcactggaggcagattgctcagccttaacttctctgtccctcagtcttattatctgtaaaatggggataaaattaataatagtttctattccatagggttgttggagtgaggaaacaaaagctaaattaaaacacacacacacactgaaaaagtatttgatgtaggtagatgtgtagagaaagtatttgaagcatatatagatgactctatatacatgagtatggattatattacatatatacataaaaagacatatgtatttttatagagtcaaacatgtcattctttccctctatggcttaagacaacctttcatgtaatcttgggagacaggaaaggttgtcttagccacagagggaaagaatgacacgtttgagttgcatatgcaaaaaacttggtacattgaaagacaagcgtgtggctgagagaaatacatgcagcacacataccacaaagagtactactcataataaatgatcccagcaatcaactagaaaaaacagacaccaaagaaaaatgggcaaaggttataaaaaagcaattcctagaaaaaggaatatagaaggccaataaacatgcaatgttcaacctcaataatagtcatagaaatgcaaattcaaatactcatgacgtgtcatttcccatgcaacacattggcaaaaatggaaaatatgaataatgttccagcatagagagaatcataggaagatgggaactggcaatcataaccaatgggaacaaaaattagtaaagcttttttgtatggcaaatttataaaatctatcaaaaggtaaaatatgcatacctttgatttgtcttagaaaaacactgtacatgtttttaagtaagcataaacaatacaaacatatttatgttaaaaattgtatgttaaaaatataagctatatatttttatttgtatgtatataaaaattcatttaataaaaagcactggatgtgtgatatcaaactgttgtttcctgtgtcacctctggagagagaagtagactaagggccaggttgctttttcctcttgctagatatacttctgtgtttgaatatttcatgagtctgaatttgtgcatttgtataaagtaaataaacaggcatttttccgggcccacaggcaagaagattcttgggagcaggatgctagctgtagaagctcaaggttgggaaagtgagtgacagattttgggaagaacaagaatttggtggcagtatttaaagatgcttaaaggtcttaacttatgttttagaaaaggaagcaacccaagaggcatggaggaaaagttgctttattgatgggcgccgacctcttccatctcctgtgcctgttttcaggctttgtgcagttgcgtccccacacacggctcgtagacgcccccgaggcactgtgctcctcactttcttttccaacatgtgttccttatctctggtttattgatttattatttatgtatgtatttttagagacagggtctcttctgtcacccaggctggagtgcagtgatgagattatagctcactgcagcctcaacctcctgtgctcaagagatcttcccacttcagcctcctgagtagctgggactacaggtgtgcaccaccgtgcctggctaatttatttatttgtaggtatagaggcttactacaggctgttcttgaacttgtgggttcaagtgatcctcccaccttggcctctcaaagtgctgggattacaagcgtgaaccactgtgcctggcctctctagtttaaaagattgtcatctgaggttcaaaataagcccttcatccattatccacccagcagacatccagcacccagtctgagctggcagtgtgctaggccctagggagacaagggtgagcaaaagagaacgtgccagcctccagggacctacgcatgggttggggaggagggacagtaaacactgatgaattatatcactgtgatggtggctgcgaagctgccattgggggctgtggtggagagtcacagagggagggatcctttccctgggtgggcaggaggcgcaaggaaactagggtcctctgaggagagcctgcatcgctgcagtctctcccattccatccctttctccgcacccctaccgccatgtcttcattcctttcactgggaccactgtttcccagattttagttctttaatgcctcttttcacagttgttgccattgtcaactaccattacttattacagttcctaaaactgacttaacattattaatgtatcttgaaaggacttaaccgcaagtgagaaacaatgaaaatgaaatgatgctaaatttaaaagttaggatgataggtaatgaaggcagaactcttgaatgtggtctagaaggcatgcatggggttgctctgatcacaaagggatgctatttatatgggagaaagggaatgtattaggattagatatttagctggcagggggactctcttgtcagtgaactcagggaggacactgtaggaaagagatgacagaaagagggagagactgcagagcatttatttattttgtttaattacaagcgtgagataagccagcaacacattacaacccgggggatcagagggtccctctgagacagactgcgggagccacatctggttgctacagtaacgggcctccttataacgagaagagccacaagtgcccgacataaatggcttggggcagaggagcaacaagcggcctaccttgctgcctcttggggaaggcagtctcggggaggtttcgcagtgggtaaagaatgagactctcgtggggagggtctcgggttgtcttgagtctaggagcttgagggcctctccgggtcttactgatgaggtcgaacatagggaaaggaagtcctcctggcttcacctgtgctgcctgcgagcccttactgcatgggaggagccccaggacaagaaggcggtacagcagcttttttgaactggcttgggatgctgagagatttgggcatcccttggccatcctgaggagggccaggcccacatgatgggatcagtgcaggggggggtggtcactggggccctcctgtggtccttcttgccggcgtcacccctgtagctgcaggaacttgaaacccctgccccaaacttgcattctccttcctgccccagtatgcctcctccttgctttgctgttccctgtgcctgtgagtttctctccctcttgtcatctagttcatgcttcttatcctggaagggtcaccaaagggtcttttccttcctgctgggtcatgtgccccttgaataagctcttctgtcactgtgtgactttttagtagcattttcccaattgatatctggtattttcaaggccatttgatagttccctacactggatggtgagccccaggtggggaggggtggtgtttggttttgtccatcctgtgtcctggtgcctactgcagtgcctagatacaggaggtgcttccagaatgattcttgagcaaacaaatgaatgagacagtccccagctgtttgtgtaaacgagtgaattcccacgactcgttttgggcctggttttttttcccagtgcagcagagcacagggaatgaaggggagaggagggcctggggagcggggatgtggggtgtgcgtgtgaaccatgggaggaagcctgcgttttattccaagggacacagggaccgactggagggctttgagcagaggagtgatgggatctgacctacattgctaaaggatcattgtggttagtgtggaaagattagccaggtggagggagagggctgaggagaggatggaggtgaattagaggggtggtggcatctggaagattgggctggactgggatctgtccggaatgtagagcccacgggtgcagcgttctgggcgtcaggatcccgtgatgtgtttgttgctctgatccgtgctgtaacttttcacaggtgagctatgctggggccctgagtttcccacattacaacacacacacaacttttcaatcaacaaacctttgctgcccccaaagccaccccaggagcccctggggcccatgtgtgccagttgaggccacggtggccccacctgcagctggctggccgttcagactcctgctgctgctcccgctgcctccttccatcacagatgatactgagttgttaccagtcaagacagggaaaaggcaccctcaaagcctcagctcttcaacctgccgttctgggcctccgccatccaccgccactcttgttttccagtgccattttgcacaacttccaccgtgctcgcgcgctgtggccaaacagcactactccttgcctgcttttgggggtgctcctcttctcacctggaatgccctctcctccagttttcacatgtcaacctcctacccatccttcagagttgtattagtctgcttggtcgctcacaacaaagtaacacagactgtaggtcttaaacaaaagacattaattttctcacagtactggaagcagacattggagtcaaaatcaaggtgttattttgggaggttgaggcaggagaattgcttcatcccaggagtttgagaccagcctgggcaacacagtgagaccccatttctcaaaaaagaaaaaaattagccaggcgtggtggtgcgcaccttgtcccagctactgaagaggctgaggtgggagggttgcttgagtgttgagtttgaggcttcagtgaggtatgatcatgccactgctctccagccttggcaacagagcaagaccctgtctcaaactatatgtgtgtatatatatatatattcaccttgtatcttcacatggttatccctctgtgtgtgcctgtgtcctaatcttttcttatatggacatcagtcatactggattagggctcaaccatatgacctcattgcaccttaattaccacttgaaagaccctctctccaaatacagttacattctgagacattaggggttagggcttcaacataggaagggagtggcggggagggacacagttcagcccatgactagagtctcagtgagatgccactttcccctccagcacccactgtgctcacacaccatagcctgttagtgggcttctttctagcactggttgctgtgtcctttggtgttcgttcgttcgttcgttcgttcgttcgttcgttcgttcgttcgttcattcatccatctaaaaatagtactaagagacatctagtccagactcctggactgtattattctttgagtcctgaccacaccaactatatctgacacaggtcacctgggacatttaattttttgttaattcatcaaacaaaatttctgaacacttctcatatgtaaggcattgatccagatgctaggcagcaggcacagcagaaggggtctgaatgccagccagctgctggtggggccactgatttgcctttccttttaaatgcaaaggcgaatcagagttggcacttccagttagttggagagacataactggcatatacagtcatacaagagaggacatagacaaaatgcttggaatttagagcaacaccaaatcacatttgtctttgtaggtgtggggagatggcagataagactacaagggtgaactgacatttgatctgggacttaaagatgggtaagatttgtgtagataggtggccttttgagtttaggcttttttcacttagcatagtgcatttgaaatacatcctttttgtgtgtgtgctattcattcacttttattgctgagttcattctttctattgctgagtactagtctaatgtggggatgcatcagtttatgtatccactcactgttgagggagagttaggttgcttgacttttgctgttacgaaatcaagctgccatgaacattagtgttacagatgtttgtgtgaatacaaattttatttctcttggataaatactgaagagtgggattaatggattgtatatgtttaatttttaagaaacttcagcactgcaaagtggctgtaccattttgcatttccgccagcaatgtattagagttccagttgctccatatccttgccagcacttgatactgttttgttttgtttttaaatttttagccattctagtaggtgtgtagtgatagctcttatggtttcaatttgcattttcttaatgactaatgatgtcaagcattttttcatgtgcttatttgccatccaaatatcttgtgtggtgaagtttttatttaaatatttggtcattttttattgccttgtgcagtttattattattatttgttattaatatggacatcatttgttatttttaacaaaaataacaaagaggctgggcactgtgactcacgcctgtaatcccagcactttgggaggcgaggcgggcagatcacctgaggtcaggagtttgagaccaacctgaccaacatggtgaaaccctgtctctactaaaaatataaaaattagtcgggcacagtggagggcacttgtaattccagctactcgggaggctgaggcaggagaattgcttgaacctgggaggcagaggttgcagtgagccgagactgtgccgttgccattgcactccagcctgggcgacaaggggaagactccgtctcaataaataaaaaataaaagtaacaaataataacaaaaatggttattattcaagaattcaagattcaagtcctttatcagttttgtgttttgcagatatttcccttccagttgatggcttgtcttttcattttgttgacaatgtcttttgaagaccataagttttaaattttgacagtatcccattaatcaggtgggtttttttgtttttttatcttagttattttattgctcatatttttggtgttgtaactaagaaatctttgccttactcgaggtcacaacagttttctcctgttttcttctagaggttttctagtttcaggtttcacctttaggtcaatgggctgtctttaatgtggaccagacactgggcccacaggtgtggaaccacagaggaatgagacagagcccttcactcagggaccatctgggcaagggaggtgggggtgggagtcacacagggaaacagtctttgtctggtgtaaggcctgctgataagcctgggtccagggtgctgtggacacactgtggtgtggaagcaggtctgtgcccagacaaggggctgtgaactgaggtttaccagacagtagagggtaagtgaaaagcaggagttcaggctgggaagcctgttctgggcttagagtggccttgggcaggcctggaggctggatgatagaactcagcatccctgcagctgctggtcatttgctgtgcctggggtcaaagtgcaagacagctggcaggagtgggcagaagggagcaggggcctgagcacttggtgtgccttatcctccaacaaagaggaggtggaggtggcttcatggcatggctcaggctgtgctctttgagggtcgggggtaactgtccctctttattttgaaagtcagatgtgtctgtgtcataaagggcacatccatagggggcagcggaagtgctgttacataaccgtttctgtccctcacgctggaaacagatcgcacagcagttgctgtacttgctgttccttgtagacttactcctgtgcaaggaacgtgtaatgacaaggtaatcccaggagcagcctgcaaaattatccgtcgtatttgtggttcctgtgtatatttaaaacacaatgctagaagcgattgatgctgacgaaggatagggcatattccaggcactgaataaattaaccctgcaaagcacagcagttgctttcattagccagctggcactgcaggaatattgctaaagcctgtgggttagaaaagaaaatctcaggaatgcgagaacaaaaaagaaatcagccacattcagtgatttaacttaatctggcaacaataaggaaatccagaactcacggtgctctgagcaatggcggactcccgctgcatgtgcgagtggatggatattccctgttcagtggaggggatatccaccacgactctgggtacccacggcgggatgcagatgtgagttagggccatgcggcgatgatccaggttttgttcctgcatcctctgcaactagagaagctccagcaaagttctgtgttcccctcttttcttcctgatgtccccaaggagtgaagcaaatgaataggcctagctaatgtgccatctctctctcccttctctacctggccaggcactttctgggatggctgctgccatcatgtccatgacactgaaggcctctgctgcctgcagtcccactgctgcctccgccaccctgggcaccactgctgccttgttgccctgtggctgtgaggtgccatagtgccaagtcttcagcacgccccagaagccatgatgagtatggtggaggcctcagaattttcctggggaagtagctctttccatgttgccttgatggccctgttcccacctcctgtctctccccctaggccaagtgttatcccaggagacccttcacttccacagacagacagacagactgccagggaccctcctcagccagcctcttcacatgccgaggccacagcactcagtgtggttgggtccagttgagaccctgctgctcatgacttaaggcttctgtgcattgaattaagccactaggggacttatgagatcaccctctggcttctcttgttgggtcccatacagccagtatgtgtcaccaggggcatgtggcatgtgtagcctgcctctcctgagtttgcagagctgggctggctcctccttgattttatcttcctctggaccagagtggctgaagtatagtgagcagagggaggggcagtggacgtggtgaggggccagacctctccatccatgggtgggggctctcgttatggagggtcccttttttgcgtctgtgctcagcagtgcgggggaagagggtttgtccccttcctcccaggtcctcatcgttcaaatgcacggaagcatgttggtagagcacacagaggttttgctgggtgggtggggcagcatgccctgcagttcttgcattgtttccagaggaaatagaatagaatgcaacagaactggcctgcctgttgcctgggaagctgttctcctgacatcacagggctgtgcccatatccccgcttggcttaggggcccctaagttaggaacaaagaagcagaaaaggttggataaaagataaggtactcagacttgatactttaaattatcaagttcctaagtctatggttaccatcagttcatactttacaaagcatttattaacataaattcatttattatgtttctgtgaagatgcctggttaaatctgaaaccatagaaatgtaaagtattgtttactatttctgtgaaactagggtgtaaaccaaaagttttaaaagccatccctcaggaataaatttaggaattatttctcaagcatgactgtgagttaagaatattaagttttataacactgatgcttacacatcagcatgaatgttttcaaggtagtagtgctggaaggctctatattcacatccatggggctctcatcctgaaagcagtctggggactttattattttttttcaaccatttagagatatttataagtattatgggagaaggattgtcattgccttccagttctcttttgtgcttgcccgttaattcagcacctatttagtgagtggctcctgcctgctgggactgtgtacctttgtagaagctccctggctggtggggcagggccagggaggcacccatatgcatgttttcagtgaaagccagaatctaagtattcattaactaatatttgttgaacacttattatgtgccaggaacacaatggtgaacaagggaggtaaaggccctgctatcacggaccttccctagtagcacaggaaggcagataacccatgacagaaaatcaatggcagataatcgatggcagtgagagtcttcatttggtgataaaggctctgaagaaataaaccaggggctgtttggtggggtgggagagctactctagagagtataagaaagacgcctcctagaggaagcaccttggagcagagactgacctaggagaaaggagcccactgtgtgaggagctggggggacattctggacagagggaacagcagggtcagagctcttccttgggaactagctgcacatgctcagggagctgggagcggcccacatgaagcacagtgagcaggggagagtgatcagagctaggcgaggaggtgggcagggccaggaagcctaggagcttggggctgggacaaagaccttgggctttcactcccaatgcagtgagaagccactggggggttctgtgtagggagtgatgtgatctgatttttgtgtacgtgtcttaattttgaaactttaattttagtgaaaaaaagtcacataacatgaaatttaccatcttaaccatttttaagtggacagttcatgatttgtgttttgaaaagactcctgtggctgctgaatgggcattaagtggtaggcaagaaggggcaagagcagaagccaagagccagtgaggggaggctgcagcacccgggtgagaggcagggctggcccaaggggtgggcagtggtcacagacctaggagttccagaagagagacgattttctggaggtttagagctgggagtatctcatcagaaaggtttttgcaagaaagtcttgattggcataagcctaaaaggaggggataaaacattcatacagggaggccctcagattggtgaataccccaagatgagaaccgcaagtttcattggaagtgcagagaagagtcctgtttggctacgctgcagggtaaggggtcagcgtggctcagccgagctcaggcaagccgtcatttaatttggtggatgctattgtctgaatgttgatgtaccccccaaaatttatctgttggaacctaaaaccccatgtgataggattaagaggtggggcctttgggaagtcggccatgagggcttcaccctcatgaatgggattgtgcttgtgcaaaacaggcttgaggagctcccttgccccttctgccatgtgaggcgcagcaagaaggcaccttctgtgcggcagagtgagccctcaccagacactgaatctgctggtgccttgccttggacttcccagcctccaaaactgtaagcaatgagtttgccttgtttataaattacccagtctacagttttttgttgtaggaacccaaatggactcagacggtgtgtaaggggagcagtaggccagggttaggcacacagcctgaagtggcattgctgagggtcccgttgggggagttagcaaactcctcgacattcccttgttgctgaactataaaatggggatgacagcagctacctcacagggtagtcagaaacatgaaagaagacgaaggaaaatgatgaacatggtgccagtctcttagttggtgttgctaaatgttagcttaaaaatacagtaaaatgggctgagtgcagtggctcatgccagtaatcccagcattttgggaggcttgacgcgggaggatcacttgagcccatgagtttgagaccagcctaggcaacaaggtgagatttcgcctctatataaaaaaaaaaaaattagccaggcgtggtgacacatctgttgtcccagctacttgggaggctgaggcaggaggatcccttaagcccagggggtcgaggctgtagtgaattgtgattatgccacagcactccagcttgggcaatggagtaagaccccatctctaaaaaaataaatgagtaaataagataaaatgcaggattttgagcagaaaatgactgaccccagctgaattttcagaaatctgtcttgaatatgtggaacggatgagcccaggagggccttaatgccaatctgtgctggagaaaaaggcagggctcctacaggaaatgttgcaggcatctgatctgctggcctggacagccgtgaatttgagaaatgggcgccctagagaggagtccaagatgactgaggttttgagtctggaagagcaagagaaaggctgtgccgatgacagaaatagggaagtccgggctgaagctggttattcagggtttgttctgtgccccaggctgaggctggctgtacacaggcagatgccaggaggctgcccctgggaagggcttaccaacaaggagaggcatacgtatgagaccgtctcagactaggagaagattttctggagcggagagacttgagcacactttggaaggtggtgttgaagttagccgggccatgggagctgggcaggtttcctgggcctcctgtttgccacaccacatctctgtcttcttcctccagctctgcaccagcgcaggcgaccgtagacactgtacctgtgtcccatgccttccctgagcctgtgggcagcactggctgtcaggttggagggagggagaggatgcgtatgaggtgtttcctagctctggggtgctgcactttccgttttgcttctccctttcattacaagccctgcccacacctttgtaaacacttcctttctcagctcacctcagttccccagctggcgtcccaggcagaggcagttgcatgtgcaaaggcccggagccaggacttgataaatatggctcaagatgctgcagcctagatagatatgaaagtctctggttccctcctatactgtagtttttattctgtttactttgcactagaccattttacactattccaaaaaaaaaaaaaaagggctcttattttatttccatctccttttcctactgccttggctcattcactttaatcctttgatggaagccatgttacaggtaagggaataactacttattagtggtcatttagctctttgggatgctggttgcttgaggcagctttggagacagaaggacgtcacagaccagtgattgtgagctcttggtctcaatatagctgccagattatagcctctctcttgggtctgcatttcatatttgggacttgcctcggcctctgtttcttattccagattacaccctattccttatgggtctccatattataccctattccttatgggtctccagattacaccctattctttatgggtcttcaccttctggcaggagtccatagtttcttactccactatcaaagtttgttttcaggtttgaggtggtgtggttagcgatgtacaaatgttcttttccatttagtttttgtttttatcacttctttttttccagtgacttctgctgatgggatcaatgaattttactttggaatttttcttctgatgctgtatggaaatctgttcttttccttatttactgggaaagaatctgaggctattgggatgatttttcatctcaagactgtgggaaataatcagctttgaagcatttcctgtggccatttgctgaagtctgggattccgtcagctgcgccccaaccagattttcagtgttaatgtttccatgttaggtggtgaggctaagcagatatgtcatgtgccggctggtctaggagccagtgtcccagggctctcattcttcctctggaagtctctccaccgtggcactgctgacattgtaggccagatgcttccttgttgtagggctcccctttgggttaccgatgtctagcagcatctctgggctctgtccagtagcaccccaagttgtgacaccgtaaatgcctctgcacattgccacgtgcccattgggcttagaactactactgtagaagaggtcaggagcaaattcgacccatgttccaaaaagctccagctcagtattttcaacatgtggttcacttacgttctatttcctgctgagtcccctggcaattgagctatgtgcacattcttattttgttggttctcagacttgaatggtttggcctcttccgcttcccagtgcttattgtgcttgtagccgagccctgagtgccctctcccactcctggagactcgtcattattttctgattgtccagaatggtttcccagttgcctttctatttcttgccttaaaaggataatgaagctgaggcccgagataacctctccaacgcaggctccgaaggcagcaatttagtggcggaacagcgtgttttcagggagcaggagacgtgtggactctgactttaactgttgcccagcgcctaattgtattccttaaataggggttccctctctcctccttttctccctccctcctttctcttctactttacactgtgaaatttaagagttgcagtttaagtcctacactattctggagaggagagaaacttggtaagaaaataaaatgtttgacaaatttaaagaaaacacccctggaacgacatcccccaccccaccatgggtgtggggtcctagatttaactgtaattccttgatcgatgtgatcctttgtggtgttcatgaggattttaggaaatcatgagattaataatagaaaccttcttttcactgtcttgtacttggctggagcctgtttattttgtatggctaattcatatccataagaaaacgattactcagctagcattcccacctgtgtttatctttcagcagccaggatttgttaagccctgggcaattttaattgctgtgaagtgtcttccctgcaggtgtgtttccctcgcttctttctctctttcacatttccaagtgaaaatagtcttctctgtgtagaagagtgtgttccttggatctgatatgtctgtctgcctcctgccctgaacacacatttaattgacccatcactgtgtgctgctgagtcagaaggcagagcagcgctccgttgaacaccatcaacagtttttgtcgagagggcggctcatagttgtcaacagccttctgtgtgcctggcacctgatggacttgttctcctttcatctttacagttttatgaagttggcactgataactccatcttattgggtgaagatgtagagaatcatgttcagaaagcatggctgagttcacaatgtcaacagtggagctgaatttggaccaggtgcatttgatctatagccttggtgctctccagggagcaaagattattcagagaggccatccgtccctggtgtttaggtgtgtaggttttggaaccaatttaaactggatctgaatcttggctccaagataaactctgagatttgggcaagttgcttaacctcccttggggaaatgaagtttccccacctgtgaaatggatatgtcttagtctgttcaggctgctgtaagagaaataccataaactgggtgacttataagcaacagaaatttattgctcacagttctggaggctgcatagtctaagatcaaggtgccactagatttggtatctggcaagggcctgctgtctggttcatagatggagtcctcttgcagtgccctcacttggtggaaggggcaaacaagctccctcaggcactaattacattgatgagggctctgcctcccagatgccctacctcctaataccacaatgggggttaggttccaacatgtacattctgggagaacattcagatcatagcaggaggtgacccttacctcgtagggttactgagctatttacatagagcatttagcagtgctttgccaggctcagaatgaaataggatagctgctctcagctcatgacagcatttatgtaaatgaactggcttcagagagccaggctgaggggctgagatgacgggagggatgtagaagtggtgggaagtggattgggaggaaacctgaagaaacttggagtgggcctaggggtgcacctgctccccttctagtaggagtccttcctgcaagtggacggagggcaccatattgtgggttttttgtttttgtttttgtttttgttttttgttttttttttttttggagatggagtctccctctgtcacccaggctggagtgcagtagctcaatcttggttcactacaacctctgcctcccgggttcaagtgattttcatgcctcatctccccaagtagctggggctacaggtgtgtgtcaccacgtccccctaattttttgtatttttagtgagacagggtctcaccatgttgcccaggctggtctcgaactcctgagcacaggcagtccatccaccttggcctcctaaagtgctgggattacaggtgtgagccactcccagcctatattgtatattttaaatttgagaagaagatgggatttgaggagcagtgtatggctgatgggtgggtacaaaatggaaggccttgcccaggaaaacaatgatgggaatgaagccgaagatgctcaggaaagggagtgtgggcagcaggagggggatggatgaggagcattttctgggtgcagtcatgtgggagtagttgggttgaattcagagggtccaagagaaagggaccctgatgcaacaaacatgggcctggacagtgctgcctcagagcgggccacctgccaaccctggaaaggaggctgcgtgttcgtcaggggcaccatccacaggatcgacgcatttgttgccagagattaagagagaagtttagatcttttaattttgactgaggtggcttttccttcttttctttaaccaaggacttagactcctgaaatgttggggaaaaggttgacagggaaaacatccaccctcttcctgctgtttttcatctctatatttttctcttttgtggtggtgtggtggtgggcaataaataaaaggcatttcatttcaggggtaacctgggcagattttggaaaatgtagacagattgcaaaatcatcctatgttttcataaagtaagccctgtaatatccagtcctttattttttttttttatttagagagaggttttcactctgtcactgtcccaagtagctgggactacaggtgtgcaccaccatgcctggctaatttttgtattttttgtagagacagagtcttgctatgttgcccaggctggtctcaaactcctagactcaagtgatcctcccactttggcctcccaaaatattggaattacaggcatgagccactgtgcctggactgtaatagtcatttctaagtaattctaatcataacataaaagggtgtcttgattaaacagatactttattaagtcatctccatgagtcagtcagactgacaggttgctggttgattctgcagtaattggtgaaattcatcagtaattctcttcaagagtcactccggctctgttcattcattttatattgggaggaggtcctcatgaaattagttactgtataggtctcaacctatgcattctttcattgttgctgtggaaacaagcaataaaaatcgtgggttgaagaagaaaaataatcggtgctgaacatctgtaaaatacatgataattaacttgctttctgtaatccagaattttaaaaaaatcatcatacttggaacaaagctgagactcataaggttctgaactaattatgtaactgaatcattaatagttttccttggaaacactgtggaaaacaaattacgccgcctttaaaggagtgtttccactggtagcagcattcacagagccgctgccatcagctctgcagcgtgagctcagtcagatgcatgcctggacacacgccaccagctggtcactgtttcaatagggtcgggaactagatggtcgggaactagagagacattgtcaggagaaacaaggtcgcagactgagcaggatgctgcctgtggttcttctcgtggctggctaacgggctgtgaggggagaggcagccagggacgctagcactggccgccatcccccgggggcagttagtgagacccaccctgcccccaccctgtgcactgtgagagtggcagttagaattggttgtcacttgtgggtgttttgtaaagtgcatttctgatgttctttgaaaggacagaacatcatgggtttggtgccctgtgtcacaccctgagtccatggggacaggcggagtcagggttggggctggaagagaaccgagagggcatttaatccagtcctgttatgttattgacagaagaaacagaggctctgagagggtgagggatggaccaggccgctccttgctcaggaatcacagtgccggtccctgctggccagtctcgggctgccttccacatctctgtgtggattttcccctgatgtcttcagctgtatcttgctggtttgaacaattttcctttcataaaatattgtagttagggcagtcactctgcccaacagtgttgggtctgaccaattaaaatatgcttcattaattttttatgatacccatttttatccaaaagaagaaaaaagtcattttgtgcttctgtgaattctttcaagtaattcatttatgtttattttaaaaataagtatattgttcctttgtcaaccctaaagccacaaagcttatgggcattttattggttgactctggctgacctgttttatctgggtgtgagatacagatacatagtgtatgggtatttggtggaatgctgtctcaggtcattctgctgaaaagtgatgtcaggacatcagtaatgtggatatgtttcagtagtttggtaaaagctgttatggagttgtaaaaattagcctagtataaagcctataaacccatcttaggaatattctatttccagccaaatcataggtgctcctactctgtgatagttcatggtgacgtggtatgtggggtgtaaagtgtgatgatgtcatgcagcaggttcaagtgatggagacatgtttttcttttctgctcttttgcaggacagacccacgaagtcaagcatgcggagtgcagccaagccctggaacccagccatcagagcagggggccacggcccagaccgggtgcggcctctgcctgcagcctcttccggcatgaagagttctaagtcttcaacttccttggcttttgagtcccgactcagcagggtatggatcaaaatgcacagggccaggcagagcgcctggataccctgggttgggaggattgaagagggcagtaagcaaaccagtggcctctcggggcagggaaggaggctcccaaggaggggtcgcaggaggaccagcatgcctggacatgaaggaatagagctagcgggtgggagtgggggccctctggggtccagaaaggaggtctgcaaagtgtttaacacagtaattaaggtcctctgccctgggttgcatggacatcccggcagttttgccccaagcacggccctggataggggtcgaggtcatgcacgatctttgcagccccccacaatccagttgtagttcttcaagcccctcttactggaccccgcagcagcatggacgctgttgattacgcccttcatgagggagtgcgttctcctctggttttctcctccccccatccctttggtctctaaggttgggtgggcccatgccacattcctagactcatctcttttctagctgcattcatttctttacatgagaggctctcaccgtgcaaagcctagtgcctccttagctgccctgagatgaattcatagacagtagcacctacctcatgcaatactttagaaaagtcaatatgatcttctatattagcatggatttccatctgcacagctgtgctaaaggccttgagatgctccttaaagcaccacgggcgtgacagctacaatgcagatggatttgagatgcagactgatttgaattgtgttgatgactcaactacggtgaaggctgctgcagaaggagtgacgggattgttttgaaatagcagacactcttggtgaagttctgaaccaagcatggtgccggctccctttgttttagtatttttggacttagagcagacactcttggtgaagacactcttagagctaggcaaggggcacattgtttttatgagtcaaatggagggaggctctaggctcagataataataaaaggtgttccacctgtgtcagtgcctgcggaatatgtggaaagtgtgtgggtcgtggagcagttctttgtgtaagattgtcatgagcattttaggacatctgaatttcctgtcctcctacccgttaaatattagtaacacatccagtcatggtgacaaccaaaaatgtgccctcagattttcaacacatcccctgagggacagccctgtccccattgagaaccattgttctaggtgacgggtccattctcatggcttttaacactctaagtggataacgtccaaatttgcatctccagctgggacccctctaactgcctttgtgacatcacccttggatgtccaaaagtgtaacatgtccaaaaccgaatctcaatgccttcctctccatctctctcaccatcccctaacctgctcccccaaatcttcccatttgtgtaaatagcaactccatcttcttggttgctcaggccacagccagtggcatcacccttaaaccctccttttctcatgtctcacagtccatcagtgaaatgccatcacttctaccttaaaaatatgtgtcaactccaaccaattcccactgcctcccttgtgaccagttgggtcatgcccccacccttctgtgccctagtcctggtccttggaacacctgagtcatgtcacttctctgcgtcaaccctctagtggctctccccattcactcagagtgaaaagcagagtccttgaaatggccagcgatgccctcagggcccaaccctgtcccctgcctctcaggtgtggtctcgctcctctgtgccctggctcctggagctccagccacacgttctgctggtgtttggtgacagctgtccttcggattgccaggtgcactcctgcggcagtgtgtttgtgtttgctgctccctctgcccggaaagcacctggtgcctctataggaagtgtccttgacctccatcctcctcctcctgctgccttgttttccttctctgctcttgatgccattgcacacacctgcttgtttacggtctgtcttctcatggctggaaagtaagccccctgcagacagggactgtatgcttcttttttgtactcggctctgtccctagtgcttagaagagcacctgctacctggtaggcactcagtatttattgaatgatgagcacacctgttttctggcggtctgatggaacaagaggagcttgggggcgtggggctggcctgagttggaatcctggctctgccacttccccactgtgaagctgcaggcaagctgtgtagctgccctgagcttgtgcttccttgtctttcagatgaaggtaacaccttctttgtcataaggagtaaatgtgggtaaagcatcctatgtgtaattttgtttattattctattatcctggattgaaacatcatttccattatttttgtttttattattttcaacccaacagcacactttaaacttagatttttatgtttattattattttttctatatccaataagcaacatataaacttagatttttaaatgaatacatacattccacaataacagatcattagagctgctggaatacggaaatatttttaaaagcagtgtttaaaataaggcctcggccgggcagggtggcttatgccactttgggaggctgaggtggatggatcacctgaggtcaggagttcaagaccagcctgaccaacatggtgaaatcctgtctttacccaaaaaaaaaaaaaaaaaaaaaaaaaaaattagccttagccgggcgtggtggcatagtcctgtagtcccagctacttgggaggctgagacaggagaattgcttgaacctgggaggcggaggttgcagtcagccaagagcgcaccactgcactccagcctgggtgacagagtgacactctatctcaaaaaaaaaaaaaaaaaaaaaaaaaacccacaaaatatataaaataaggccggaagaagcataggaatgtttctaaaggacaatgaatgagatgctggacacttctcccattgataggttcatgttttggaaacttgttccaaagagaaaatgtcagggaaaagcaaatacagtcattccttggtatccttgggggattggttccaggacccactgtggataccaaaatccatggatgcttaagtccctgatataaagggtgtttgcatataacctacacacatcctcccatatactttaagtgatctctagattacttatgatacctcatgcaatgtaactgccgcatacatagttgttatactgtgtcattttaaatttttttattgttgtattgttaatttttaaaattaatgttttgaataactttttctgcacttggtaccatgcgcatattaggggccttctgctctccttcccgattcctgtcctctccaggcctgattctgtgcaggaaaatgatagggcttgagggaaggagcagcagaaagaaatgtagcccgcctgacctttccagccctggttctgttcctctgatttgaccttaatctttccacctatggtatgggaagaagaaaaatactaaaaaggaagtcagagagcagaagagagaaagaggaaatggtggtggacaaaaaagcaagtaattttccctcccaatattttactgtgacaatttgtaagcacacggggaggttctacagtagtacaggggatcccacagcagacaccatagaccaccacctaggtcctacagttagcatctcactatatttgctttataggaaatggatagatagggtttcactggtcaaaacaggaacactgagacaaatccactgaaagtagaactgaatacctgactttctttttttaaattttaattcgaattattatttttttaaaattttactttaagttctgggatacatgtgcagaacatgcaggtttgttacataggtataaatgtgccatggtgctttgctgtgcctatcaaccagtcatctagattttaagccccgcatgcattaggtatttgtcctaatgttctccctccccttgccccctacccaccaacagacccgggtgtgtgatgttcccctccctgtgtccatttgttctcattgttcaactcccacttatgagtgagaacatgcagtgtctggttttctgttcctgtgttagtttgctgagaatgatggcttccagcttcatccatgtccctgcaaaggacatgaactcattcttttttatggctgcatagtattccatggtgtatatgtgacgcattttctttatccagtctatcattgatggatgtttaggttggttccaagtttttgctattgaaaatagtgctgcaataaacatacatgtgcatgtgtctttttagtggaatgatttatattccgttgggtatatacccaataatgagattgctgggtcaaatggtatttctggttctagatccttgaggaatcaccacactgtcttccacaatggttgaactaatttacactcccaccaacagtgtaaaagcattcctatttctccacagcctcaccagcatctgttgtttcctgactttttaatgatcgccattctaactggcgtgagatggtatctcattatggttttgatttgcatttctctagtgaccagtgatgatgagctttttttcatgtttgttggctgcataaatgtcttcttttgagaagtgtctaaatacctgactttcaacattggcctgaactgaaggagcagtgaaagaaagcagggtgcagaggctggggacgtggacactcagggagggtgcatacactcctgtaaatcctccttgtggtatctgagcacagcccagaaagaagagaacctgcagtgtcatttgcgaggcccaggtctattaattggggtcctcttggttgcaaatgatgaaacattggcttaagcttgcttcagcagaaaaggaatgtactgagcagatcctaaggctcccatgtcactatgagcgggacaaaggtgcattttaacaaacccttcctgtgactctgatgtctgctcaagtttgagaagcggtgtccaaccataacatgttatccaccagtaacgaccagattatgttatgtctgatgattttagggctgtgaattcttttctacatctttgtggaattgagaggaatttcttagttactttaatctgtgaggcatttgaactttttccttttatatactttcttatacaggtggttggcagcttaaatatcagtgaagctgttaatgaagatacttactaaatagcaaagcagcaccgaagtgcacaccttcataggatcttctggagcaagccagaaatctcaagtggtgctgtggccaggaaacaaagcaaaaaatgcagtggtgaatagagaaggagcaagaattagtaactgagactggtagctttccttttgatgttgcatccaaaaagcagtgacaaagtaagagtagctaccttcagctgtttgttttgaaggacacgtgggatcagttttttgtctttatgtcctacccccaggaaaccttttaagctaccagtctttttcaaatggaattcctcgtggaaggtgcaggggaaatgaagtgctccccttgaaagctttgctgctacccaaactccatgccctatgggagggaggtggcacagcactggcctgcagcacatcatacttatcctgttgtctgggaaggacaggaccacatctacccacagtgcagcataaaatcccctagtccaagaggagacagagtcagctgagtgtggctggctcacaaaatggaacacaatagctgatgtgtgttatctctagctgtgcctggtgcatcacaggcaggcacactatgcatttttactgaatattgttcttggatggatttaccgaagaagagcctgaggttcagagaggttgatgacttgcttgatgttctattgtactctctggaatccccgttgcattgcgttcatttttcctaaaaacactcccctcctccctcctcctccttgccttaatttgaatttagtttttacaggataacaatagtaaaaacaataatgatgattttcatttgttatcgttatagttggtgtctgttcaatgcatactgtgtcagacactgttatcctaagcacactgcatggctaacttgtttaatcctcagagcaacactctgaagtgggtaccatgatcatacttactttttaggtgaagaaaccaaagcacagagaggacgtgatttgcccaaggtcacacagctaagcactggcagagccaggattcagacccaggtggtctgtattttcagcccttggccactaaactgtgctgccacgtgacatagcttttttcccaacccctgtgacgtgggatggggacctcctggctcctgttggtcttcagcctggtgttgctgtggaagacacccacccctccagaatgcctccctgccctctctgcctgagaaaaactgaatcatggcctcttctgtgaggtcttgggactcccccagcccctcctgggctttctccacattcgtttctctgcagcttagtgctgtcctcagtgtgttctgtgtggttatatgggaacctcctctttaggtggttaactctgatcggcagggcctcctgattcactttgacattcatgccatatgcacagcatacagatcttctaagtggacgtaggctaaagatgtacgtccagcctctagtgggtttttggtaaagcttagctgaattacagtgttcagaatgggagggacaggaatggagaagccacaagcccgacagaagcagccctggcaaagtgacaagaagggagggaggggtttggagctgtttctcctgccgatcttcccttccctctcccacatacatgtggagggctgctgcagtctccctaggagcatggcatcccaggaggagtgcccccctctctccccaggacgtccgcatcccccgtccacttcctcctggcactgaaatctggactttatctcactgcaggattcactgaaaggctgttggatggctggaatccccttcagcctttacagctaacatactaggtgttcccatattctaagggctcttttactgtgggtgagctggctggaggagaaggggagaggagaagggggacgagaaagggagccccaccctctgctcaggacccattgttcacattcttttccgtgtgaaatgttgctgcatccaggccctaggctatgagtggtggcatttctatgtttgtggaatgaatataaagtctgttttaggatcagtggacaaaaatcagcatgtttgaagtggaggttacaatcagttggttagtacgatatttgacatttaccctgggcccttaatggtgcagtttttctgatgtaaggagggtgaaaaagcagccactatgtgtactaaacagaaggcgtgatgagtacagtcagtgcaggatcgtgaaggcatcagcacattccttcttcagctaatcagcccagacagtgtggggtatttttgtattctctgctgtttgtgctctgagtacatgtgcacaaaatgcagtgacactgatcaataaactctttaagcctaataagcatatgcagtctcatagcaatgaggacataaacagggagaaggatcttaggtgattcaaattctcttttgttggccaggcacggtggctcatgcctgtaatcccgccactttgggaggccgaggcaggtggatcacctgaggtcaggagtttgagaccagcctggccaacatggtgaaatcccgtctctactaaaaatacaaaaattagctgggtgtgggggcacgtgcctgtaatcccagcttcttgggaggctgagacaggagaatcgttcaaatctgggaggcggaggttgcagtgagccgagattgtgccactgcactccagcttgggtgaaagagtgagactgtctcaaaaaaaaaaaaaaaaaaaaaaaaaagaaaaaaaaattctcttttggaggtgaggagactgagctaccagatccaaacctttccagggctccatggctcacaggttgcccgattcctaatacagcatggtacttcatgccctccttccaaaggaggatttagattttgtttgtaaatctaaagatgcttctgttgctgccagcctggagaaccaccatggagagccactaggaaaacagctgcaatgatgatgttgaagatgatgagagcctccaacatttatgttcttaataaaatgctttaaatttttaactaagggcacaactctagagatacgccaactgctttctcttttttttttcggtgggggggcgggagacagggttttgctctgttgcccatactggagtgcagtggtgcaatcatggctccctgcagcctcgaactccagcgatcctcccgcctcagcctcctgagtagctaggactacaggcacgcagtgccacaccccactaatttttaaaaaagattatttgtagaaatggagtcttactatgttgctcaggctggtcttggactcctgacctcaagtgattgtcttgccttggccttcaaatgttttctccattttagaattgaggaactgcagcatcagtacctgggtcatataggtaggaagaaggagcgctgctcccttcaccactccctgggctgcctccttcctgtgtgattgcagggaacctcctatatagagatcccagatcccaagtcttcttttgcatgtcccactccctccccacccttgaaaacaaaaacaaaccctgcgatgcagcacttactgctgactcctcaccagagaccccccagccctgagcatggtgctgcagctacctgtgctttccccccggtcactgctactgcttcacccctgttcttatcatgactggcgccacctatgttaccatgccaggtcctcttgcagtgcctcaaaggcaaaactcccactgcttgcgcactgctgtcttgtgttgcctccagctgtcatctcaccaagaccttgagtcccaggaaccaaccccttatggaagggggcagggcaagctctacctctgctgctctggggtggtggctggggatggaggctgtggtgggatctccgagggggtttcacttctgttcccagtaggagtgctctcatttgttggatttcctggtttattctgggtttcagagagcccttcctctcttggcctttgctgtagagtttgaaaattctgtactttgagtcagacttgcagattttagaaatgtcagagaatcagataggggaaaagcagaatccaccgtgtatggcttgcgttattgcgttaagaattcccttaaccactgtgatttccctttttcatttgagaagtcatctagggagttttcaaagtttcaaaccagaattgattttcatttggggaccagggaggcacctgagtgtgcttcttggaagagtgagtaatagtttttctctattgagaaaaagctgccaacattatagactatggtcatttaatattaaacatgtattatacaggtgacctgatggatggtttgagaggttggagagcttgagtgaagggatgctttttactctgagatgggaagtggaaagaccattacagagttctctaagaagggtagtagtgtaacttctggattaactcaagtgtcatgtttggtccatgatatggtttggctgtgtccccaaccaaaattcatgttgaattttagctcccataatccccacatgtcacaggagggatctggtgggaggtaattgaatcctgctgttctcatgatagtgaataagtctcaggaggtctgatggttttataaaggggagttcccctgcacatgctctctcttgcctaccaagagtatagtgagatgtgactttgctcctcctttgctttccaccatgattgtgaggcctccctagccatgtggaactgtgagtcaactaaacctctttcctttgtaaattacccagtcttgggtatgtctttattagcagcatgagaacagactaatacagtccagttgctaaattaggggactgtgctgttgttcagaaaatgtggtcgtgggccaggcgtggtggcccacgcctgtaatcctagcactttgggaggctgaggcaggtggatcacccgagatcaggagtttgagaccagcctgggcaacatgatgaaaccccgtctctactaaaaatacaaaaatcagccaggtgtggaggcacacgcctgtagccccaactactacttgggaggatgagaatcaggaaggcagaggttgcagtgagccgagatcgcatcacggcactccagcctgggcgacagagtgagactcgtgtctcaaaaaaaaaaaaaaaaaaaaaaaaagaaaagaaaaacaaaagaaaatgtgattatgctgacatctagtaactggagttgcacacaaatcatccttttaatgtgaattacttgtttttaaagttaataatttgttttgaaatcttgaccaagattgcatggctaatatgaagacatccaccatcaggctgggagtggtggctcataccgataataccagcatttgggaggctgaggtggaggattgcttgaggccaggagttcaagaccagcctgggcaacatagtgagatcctgtctcttcttttcttttcttttttcttttttttttttttttgagatggatagactgtttgccagtatagagtgcagtggcgcgatctcggctcactgtaacctccatctcctgggttcaagcgattctcctgcctcagcctcccgagtagctgggattacaggcatgtgtcaccacacctggctaatttttgtattcttagcagagatggggtttcaccatgttgaccaggctcatctcgaactcacctggctaatttttgtatttttagtagagatggggtttcaccatgttgacaaggcttgtctcaaactcctgacctcaggtgatctgcccgttttggcctcccaaagtgctaggattataggcatgagccactgcgctcgaccatgtgatcccacctctacaaaaatatttttaaaaaattagccaggcatagtgttgtgcacctatagtcctagctacttgggaggctgaggcaggaaagcccaggaattcaaggctgcaatgagccatgtttgaactactacactcctgcctgtgtaacagagcaagaccttgtctctaaaaaaacaaaaagacttctaccgtcatccctcttgttaaaaggcaatggcgagttactgtttaatgagtagactttatttgtgatggtaaaaatttctggagatggatggtggtgatggttgtacaacatggtgaatgtatttaataccactgaattgtgcacttaaaatggtgaattttatattatgcttattttagcacagtaaagttttaaaaattacaaaaaaaaggaaaaaaaaaaaacccagaaggctagtatttgcaggagtggaactaggactttgcctaaattgcaaacttccttcactccaattttctttttctgttttaatgaagcacagcatatttacaataaaatccataaagtacactaatcttaatcttagctataaagctcattgcatgtttatatttttttacacttgtgtaaccaccaccctgtcaatatgttgaacgttccagcaccccagaaggtttctttttggttgtaactccccgagaggtaaccactattctgacttatattaccatcatttgattgtgcagcttttaaacttaatacaagtggaatcaggcagtatatactcttttgtgtctgcttctttcacttagcataatacctgggacagccacccatttattagtatatcagtaattcatttttttcctatttgctgtgtggttctcattgcatttatcctctctgttgaaggacatttgggttgttctagttttgggctgctataaaaaaggtgctatgaacattcttttgagggacctatgtacttgcttctcttgggtgcggatctaggaatgggattgctgagtcacagggaactgtgcgtgctcacttaggagtctcccttcttcgacttactgcctttcagcaaatgtttgtcctacccctttcatgacagggaagaaagcaaagcaagagcagagggtgttgctttcttctattttccagccttagcgttagtagatactgccactttccaaagcagttatgccagtttacacttccactcacagggcatgagtgttccagttgcttcacagcctcaccaacacttggtattggtgtttattcactttcaaactatggtggggtgagggtggttacaccctgaaatttaaatgatgcaaagatggaaactttaaaaaattgtgcaaatatttaaacttctaactctcagtaaatgaccccaaagccagtggagtaggatggagcagggcttttcccttcagcctgtgtgatgggcggggctcgcccactgcatatcgacattgatttaagggcttttccttactgtgtgctctggatgtcagatacattagacagctttgggcagctgccttctccagtcttccggcactgttcctctccagagccttctttcatgaagacccaacagtagttgagagaattcagttgtggtttttctcattaacgttgaatgtaatctatctgggcctgaagtgtggatcacttaggagtctcctttcttagacttcagcaccttttagcaaatgtttgtcccatgacagggaagaaagcaaagccagaacagagggcgctgctttcttctgtcttccagcctccaagatttcctttctcacctttgaacacattttctgtgtcagatcatctacagaatgcttggtggtgaggccacagcagatactcagattgtttctctccctccacctcctcctggcctatgtcatgagcctttttttgttgtcctggaatttcttttgcattgccctaccctgccttttgtgcatctcccagttcttttttcattggttcccattctttttttcccccaccaggagagcagatttattttttatttaaaatttttgtttagagacgaggtttcactttgtcacccaggctggagtacaatggcacaatcatagcttactgcaaccttgaacttctgggctcaagcaatcctctcacctcagcctcctgggtgtcaccatgcccagctaattaaaaaaaaatattagcgagacagagtctcactgttgcccaggctggtcttgaactcctgagcccagcagtcctcccacctcagcctcccaaagttctgggactacagtcgtgagtcactgtgcccagccacattttttaaggctcattacttgaagtgtgacctgatggtattcttcacgcacagtcttagacactgctctttgaaacagtcatgggagatcatactcggacctgttatgacagaaacaggtttgtgtagctttgcattttttcacttcactctatcatgctactcaaagtgctgttattgtatcttgactgctgggcacatagcccagctcccatgctctgcttgtttatagcgctccttcctgaaaaccacctcttcatcctctctctttccttccaactctctcagctcaagagggccagcagtgaggacacgctcaacaagccaggaagtaccgctgcatcgggggtggttcgcctgaagaagaccgccactgccggagccatctcggagctcacggagagccgcctgaggagcggcacaggtaggagggaccgggcaggtgggctcggcaggccatcagtcctggccgcatggaagcacttcagtgacccatgacccatccattccttccctcgtgaaatatttcttgaccacttaccctgggccggaactgttttaggcagacgatgtcgctgcccacagggagtttacatctatagagtggggagaccgatgagaagcaaaaggtaactgggcgtgctgtggtttctttggtcccttcggaggtccatttgtcaccatgcacgtgtgaaatccttctgacatccaagcagggcggcatatgttctggggctgtcttgatacagaatgcattagaggaatgaatgaaccctgttgatcccttgcgaaggtgggtgtctaatatttgtactgaaccctatggaaagctgggaagagcctcgcccagcagctgtggaaggctgctcagagtggcttggacggcagtggcaacaggaagctgtgaaccttctcagtgttactcattttttaagaatcagaaaagggtttttcaatcattatatttgagttcagagcatgtgaaacatgaaatatcaaagaatttatttaattctctctttgtgcatatagataataactcttaagctttcatggcctaactcttacagtgcagccctcagtgtattgctaaattgtctaagacgggaaaaataactgaaatacatcgttactaatttttaatgtgttgaaggggcacttataatttttgtgctcttttcgtaaaagtcacattcaggctagatctcaaaaggtatattttaatttatcagtttttaaaaagttgaatctgtgaaaaccatacaaggtattcttttcttggatataaagggaatggcctggtttttctatataatggctttaccattgtaaatactgatattgtattaaacatacacacacacttggtttttaaaatacaataaacaaaagtaccatttatttttatcaagccagcctaacagtgatcccaaaagttaataaagccccactcaaaaaaagacagactgggaggagcctaggggcagggtgggaatgaggaccagccgagtcccgggtgtgggacaaattgcgtgtgtgtggtgtgtccccaaaagcaggaaggtggcgaaaggaggcgaatcccagtgggtggagggaggggaaaggcggaaggagaaaaaggtgggaggaggatcgggtgggagggtggtggctcactcaggacccagggggggggcagcgcgatgaggtgggtggccctgttcctgaacggcagccccaagaagggaaaggtggttgctgtatgtggaactttatctgatttgctttctgtggccagtggtaaacttggcataaaagccaccagtgtgtataatggcaaaggtggactgattgatgatattgctttgatcagggatgatgatgttttgtttgtgtgtgaaggagagccatttattgatcctgacagattctaaaccacctgagggattgtcaggattccacatagactggctaacattaaatgctggaggggcggtactttacaaccacacagagcactttagtgaataaagaacctgatagtatgctggcccacatgtttaaggacaaagatgtctgggaaataagcaagatcacagaggagctttcttaattgaccgaagtcctgagtactttgaacccattttgaactacttgtgtcatggagagcttattgtacatgatggcattaatttattggatatgttagaagaagcaagattttttgtattgactcattgattgaacacctagaaatggcaataaagaattctaaaccaccggaggatcattcaccaatatcctgaaaggaatttgtctgatttttgctggcaacttcaatcaagtcagaactgcgatgccaaggtttgaacttcagtggtgctgatctttctcatttggacctttgaaacattaacttcaaaatggccagtttaagccgctgcagtcttgcacatgcaaatctttgctgtgcaaatcttaaacaagctgatctctctggatcagtgcttgactgtgcaaatcttcagggagtcaagacactctgttctaatgtagaaggagcatccctgaaactgtgtaattttgaggatccttccggtcttaaagccaatttagaaggtgctaacctgaaaggtgtggatatggaaggaagtcagataacaggaattaacctgagagtgactaccttaaaaaatgcaaagttgaagaactgtaacctcagaggagcaactctggcaggaactgatttagagaattgtgatctgtctgggtgtgatcttcaagaagccaacctgagagggtccaacatgaagggagctagatttgaagagatgctaacaccactacacatgtcacaaagtgttagatgagaattttaggggctggaggaacatgtacaagatgaaaatgttttccttatcacttttctttctccacccgctcagttgtctagaagaaataacactgtaaggaagttaaaaaaaaatttagaggattatgcttgttctcagtggtgcataagggaaaaaattgacttttttttccatattctgatttttaacagaaaagcactcatttaatagatatagggaaactagatattgctgccttttgaacagggtaggggggtttacctggttttatgaccaggaatagtatctattacatttgcttttaaataggcatgatgtggaaataccatcttggtttgagatgcatttgaggattttaatttatggaaagcacaacatatgcaatttatatttattgaatactagatgcagtatggatatttaaattgtaaaaactttacgaaaacttggaaaaggttgttcaggtttataaatagctttagtgatgcctccttctttaaatacttgtcacagcatatgaatatggtaagatcagactccctaagactcttcaggttcatttttataatgtttactttttagaacaaaacagtagctaaattacagtaatatccagttcttactgattgagacagagtggaaagaaagacatcgttgtacatcactgtcattccaaaggtacagtggaactccggatggaggaagaacttacctatcactacaacacttataaatgagcatttctcagaatgtcattctaggcaagttccactcaacaccagaccaagcaattctgtctattcacactattagcctagttttctcatacaatcagcacaagcataggaagatacttcaaaaccaaaaaaccaaggtgcaccattaatattcatttaattcaaataccaaatagttttacatagggccatcttagaaatagatattaaatccagatctactgcaatcaaagcttacacaatatgaatgaatatggtagagttgcctgttaaaaggcaatgtaatataattgctgctagaaccctacagtggggaatgaggaattttaaacatatatttgattacagccaccaaaaaagtatatataaagaaagtaaaaataaaggcatttggctggtccaagatgtaacaccaatcagtcagcacctatgattcttttacttacattttttactttttgtttttgtttttgtttttttgagacagagtatcagtctgtcgccaggctggagtgcagtggcgcaatcttggctcactgcaacctccgcctcctgggttcaagcgattctcctgcctcagcctctcgagtagctgggactacaggtgcacaccaccacgcccagctaatttttgtatttttagtagagacagggtttcaccatgttagccaggatggtcttgatctactgaccttgtgatccacctgccttagcctcccaaagtgctgagattacaggcgtgagtcatggcgcccagcctgtttttttttttgtttttttttttagtgaaatttagcctgtttttcttgagtcattttctctctgcaacagtagaggaagggcctgtatctccctaccaatgacctggtgtccttacatctaccccaagagcagggatgttagctgtgtccacagggttctgaattctacagactcatcaacatgaggcaaggaatcattgaaaaccacttttgtctcctttgggagaatgactcatctttagtatttatgtagtgtattcttctatatctacatatgcaaagctttctttgacagtaaagggcacatatgcatagtgggagaagatcagacctttacaagtgaaggaaagcaacttcagaaatgaattattttctttgctttattatttttaccaagacagagaagtattgtattgagagattatctattttcataatcaacatttgcctaaattatatttaaatcatttcactttgtactatattttcaggaattatagaatgtgttattcactcacttaaaggtacctctgtagaaataacctaaaactgcagaaggatccgaaagatataacatggtgtgtttagaaactgcagattttagatctaatgtatactgcattaataaatgatgtaaagtgtggaaaaggaaaaaaaaagactgatcccatgatcaaatattaatataaaaatttgagatcagccgggcacggtggctcacacctgtaatcccagcactttgggaggccaaggtgggtggatcatgaggtcaggagatcaagactagcctggccaacatggtgaaaacccatctctactaaaaatacaaacattagctgggcgcggtggcgggtgcctgtaatcccagctactcaggaggctgaggcaggagaatcacttgaacccgggaggtggaggttgcagtgagccgagatcgtgcaactacactccagcctgagtgacaaagcaagactgtctcaaataaataaataaataaataaataaaaataaaaaaaattggagatcaaaatattagtgcataggattcaacaataaattaaaagaacagtagtgtacatcacaactaagtgaatttatgccacccaagaatggatgaatattaagaaattttggaatataatctatcataccatattaacaggccaaagaagaaaaactgtagttatctctatagatacagaacatacatgtgacacaattaacaatctttctaacaacaaactcttgatagactatacatgtgcagagacttctttaatgatgtgtatgtgtcacaaacaaaagccagcgattcccattaaagtcaaagataattcaaggttgcttactatcaccagtcatctaaaattttcggtagatactaaccaaggcagtaagataagagagatgtagaagtacataaatattggaaatgagggaacaaaatgatgattgtaatcagataataacattgtatgctttgaatttcctgaaaattgtcttagaattttctgaaattctattagagacaataagagttctgtatgtggctagttgtagactataatatatcaataactttcttttttatttattttatttatttatttttttgagatggagtctcggtctgtcgcccaggctggagtgcagtggcgcgatcttggctcacggcaagctccgcctcccagtttcacgccattctcctgcctcagcctcccgagtagcttgggactacaggtgcccgccaccacgcccagctaattttttgtatttttagtagagatggggtttcaccatgttagccaggatggtctcgatctcctgacctcgtgatccacccaccttggcctcccaaagtgctggaattacaggcatgagccaccatgaccggccatcagtagctttcttaccagtgactagaaaagataataatgtaagaaacagttctatttataaaggaatgaaagggcaaaatatttagaaatagtgtgagcatctataaaaaaaatcttaaaactcttttgaaggagaagtcttatgtccttcaaagaagacataaataagtgaaagcatatatgtgattcttaggaagattaaatagaattaagattaaacttagtacaagatataaaatgtaataaggatgtctgaattattctaagaattccttttcatcttgattcagtgggaatttgggagtggaaacctgaataaaataactggaatttatctaaaacccgttgttctcaatgggggacgattttgtcccccagttccaacccagggaacaattggcagtgtctggagacttttttttttttttttttttttttttttttggctgtcatgactcggggctgctactgccatctagtgggtagaagccagagatactaaacatcctaggatgcgcaggaccgtccctgcagtggagagtgtcctgcccaaaaatgtcaacagtactgctgctgagaaatcctgacctagcagaataaatattctagagtaaccaggaaaattctgacaatactaatcaggggattaaccttaggcattctggaactgaagaggtgctaggcagctcagtggaacggtggacaaagtgcagaatacactggaagatttagtacaggggaaaggtggcatttcatatcacggtggataattcactcaaaaatgtgaccgagtaagtatttaggaaggaataaagctggatccctatctcattcctcccatcaaaataaattctaggaggattaaagatttaaatattaaaaaatgaaactgcaagactacaaagagaaagcatcagagaattaatttgtagtcttggccttggaagaacctttctaagtaggaacagacacagaagccataaaggaaaagatgaaaaatgtacttacataaatataagaaacttctttgcaaaaagaagaaattatttgcaatacatgtaacaaaatgcttatttacaaagagtttatacaaatcaataagaaaaagaaaaataggccagatgtggtggctcatgcctataatcccagcaatttgggaggccaaagtgggaggattgcttgagcccaggagttgaagaccagcctgggcaacatagtgagacctcatctctacaaaaataaataaataaaaattagctgggtgcgtgcctgtagtcccagctgcttgggaggctgaggtgggatgattgtctcaaaaaaaaaaaaaaaaaagaaaaggaaaaataatataatagaaatatatatagcgcccatgaaaaatacagatggctagtggaaagatactaagccttacttaagaaatgtaaagcaaggctgggtgcggtggctcaacgcctgtaatcctagcaccttgggaagctgaggcgggctgattgcttgagcccaggagttcgagaccaatctgggcaaaatggtgaaaccctgtctgtacaaaaaatacaaaaattagccaagcatggaagcgtgcacctgtagtcccagctagttgggagacagaggtgggaggatcacttgaacctgggaagtgaaggttgcagtgaactgaaatcatgccactgcactccggcctgggcaacagtgagaccctgtctcacaataaataaataataaataaataaataaataaagcaaaacaacaattagatatataatttccgctaatacattagcaaaaattaaaacagtttatcatttctggtgtcattaagggtgtaaagagccacatatggttgatgcacaaggacaagttggtaatatctatctaaatcttaatttaatctttcaccaagcatttctattatttagcacttaacggttactgatattcttggaaaaggatgccaacatgtatgagcaagttcagttgcatgattatttataatagtataatatgggaaacaacctaagtatgtattcatacagggctggttgaacaatgtgattttggtgcagtagaatagtatacaggcatgaaaatgaatacagtagatttgtgtgtactgatagggaaagatttccaatatacattactaagtggggaaaataatatggtgcatatggtataaccttaatttggttttggttttagaagtatatattaattattaaaatcaacttttttttcctggaaggatgtcagaatgattatctttgaggagagttagcagaattgatagtggcagaggaaaattttttcattttagattttcctgtgctgtttgaacattttaaacatatgcatacattgctatacaaaattaaaaacaaggtaaatacaacataaatttagacaatataaatataaactaaacttttttttgccttcacaaaatccttcctcttctacttgccttttgtagtgttctttagccatttgttggtggatttttttttattgtttgcttatagcatctgctcctttgcacaggattctaggaaaagaccttggtttcatattggctcctaaagtagacaagttcccatgccccaaggggcattggcatcctttatttgtcaaaggaaggaaataactacatatctactatacagtgatgttgggaaaaaggtctgtgaataatttatatagactgtaatgaaaagtaagtgacagttattattctcctagttatacaaattgtttgtcagttacttcatttaagtgaaattaaattatttgagttaatagggttgaatttgaaaattacattttgtttctgaagcttttatttttttaaatttattttattttttgagacggagtttcgctcttgttgcccaggctggagtgccatggcgctccacaacctccgcctcctgagttcaagtgattctcctgcctcagcctcctgagtagctgggattacaggcttgcgccaccacgcccagctaatgttgtacttttagttgagatcgggtttctccatgttggtcaggctggtcttgaactcccaacctcaggtgatccacctgcctcagcctcccaaagtgctgggattacaggcgtgagccaccacacccagccaagagcttttatttttaaatgtcagtagtcctcaacatttttgtagcacctttggacagctgatacttttgtacattgtcatgctgtccccagactgcctcatttggaataggtgaataccagtctattaggacagaccattaggagcagtggtatgcagtgcctgtctgttgcaggtgttatcacctctacagttgtatagtattgtttcggtaatcatttcaatatttgattgcattttgtctattttacatgcgtgaaaacgaggaaaatgaaagtgctggttgggattacagcaactagttgtacaggctgaacatcccaaatccaaaaattcaaaatcccaaatgcttcaaaatctgaaatgttttgagcactgacatgatgctcaaaggaaatgctcactggggcattttggattttggatttttggattagagatgctgaactggtaagtataatgcaaatattccaaaataaaaaatcagaaatccagaacacttatggtcctgagcattttggataagggatactcaccctgtagtaataagcttgggttttaaaatctcagtactgccgggtggggtggcttatgcctgtaatcccagcactctgggaggccgaggcaggcggatcacctgagatatttggagaccagcctggccaacatggcgaaaccccttctttactaaaaatagaaaaaaattagccaagtgttgtggcgggtgcctgtaatcccagctacttgggaggctgaggcagaagaatctcttgaacctgggaggtggaggctgcagtgagccgagattgtgccactgcactcgagcctgggcaacacagtgagactcagtctcaaaaaaaaaatacagttgatacaaagatggaaattatttagtgtgttagaaattagatgttcactggacttaaaccaattttctataggctcagctgtgaaggaaaagaataaaattaaaggaaattgggggacttctggcaatatatagttgatttcctttcagaggaaatttcttttcacaggaaatcaactatatattagacttgtagggggcagaattctttttatgccatgcaagacttagtttttgtacttttgacttggggacaagttttctacgatgcatagcatggtattatctatattttatttcaattgtattaattttgagaaagatttttgtcatgaaattttaatacagtgttgtgattttgaacttacaagaattaaatctatagtcagcctatattttattgcaccctttcctgggagctgatctgtcctcagggagaatccctgaaatctactccaggagaaatcatgtaatcttttggtcgtaataattatattattgtctcagccttgcctagggcgccaacttgccatctgtcatgggtggtattggaactgcttgaatggggaggcatgagcttcctcattcttttcaagactatttccagtttctggtttccaggccttatgctgttctctggggctatgccaaagtttgctccaacaatagcaagaacacagcaaaaatcacaaaaggggcttctatttttgagccctgccacctgcctgcactgtgccggcttctctgagctgctgtctctattcatgctcacaatagccataggaagagcatggttattttatctagaccaggaaccttggctttggaaaggtcaaaccagttttactttttctctcccgtgcccaccacaggtttccatatggaacatccactttttctaattggttttatttcattaatattattcacttatctgaattccaaaaaagaattctgaattcttttttttgttgttgttgttttttctatagacggagttttgctctgttgtccaggctggagtgcagtggtgcaatcatagctcattgcagcctccaacttctgggctcaagcaatcctcctgccccagctctcgagtagctgggactacaggtgcacaccaccggggtctcgccatgttgcccaggctggtcttgaactcctgggctcctcctgccttggcctcccaaagtgctgggattacagacatgagccactgcgcctggcctggattccagttcttattattctttttctccctgaggtgtcctttgtgtgtatctcatgttacacagtggtgtggcttttagagaatgaggaggttccttgtgtgcagggtcctccctgcctgccccagggtcaagtgaaaggttgtggaacccccagaaggctgtcaaggaatccagccactaggtggcagccttgtcaaaagcacccaccttctcctctgctacaagttctggttctgacaaatgtttctgactttagaaacaatgcttgtatttattgattaattcaacaaatatctttgagtggctaccatgtgcctggcactgttctaggcaaaaggactatatgagtgagcaggacaaacatccctgccttcataaaggtacatgagcaagacgtgggagagatgagaaagccaggtgaacagctggagtggtggacattccaggcagagatgacggctggcccgtgtcccccacgtcaagggagtggcaggaagaccagtggggccgcagcagagtgaacaagcagttggggaggaggatagaaagatgggggagcttgcgagtcactgtcaggactttggattttttactcttgactccactggggaacttttgcaaggttttgcacagagcagtgatatgacccaacctcattttaaaaggactgctttgggctgcttgttgagagtggacagatggggtaagcagaccagcttggaggctagggctgtggtctaggaaagaagtgacctgggctgggctggcagccatggcaccggggaacagcagctgcgtctggatatattctgaaggggagagccagctggctctcaactttcctggtttttgaattgtggaaaaatacacataatcatttttaagtgtacagttcagcggcattaagttcattcacattgttgtacaaccatcaccaccttccatttccagaactgtttcatcttctcaaagtgaaactctgtccccattaaacactcgcttcccattccccttccctcagctcccggcaagcaccattctgttctttgtctctgaatctgactgctctcagttcctcataggagtggcatcacacagtgtttgtccttttgcaaccggcttatttcactcagcataatatcctcaaggtacatccacactgtagcatgtgtcagaatttccttcgtttttgaggctaaataatatttccttgtctggatataccgtatcttctttatccattcacctgttgaaggacccttggcctatttctaccttttggctattgtgaataatgctgctctgtacacaggtgtacagatatctccttgagacactgctttgactttttgagggtatatacctggaagtgggattgctggattctcctgatggattgtaaagttggtgtagggtaagatttctgctcatgttagcagtgggatgagtgagatgaaatctgatgggccttcccaagggatgaggagtgaacgtggatctcttctggagacagcagtcggctagaaggaggttcatgtagccacatttaaaacatttttaaaaccacgagacatggaagtgcccatttagatgtttctttatatagcacacgtgggatccaaagacatgtcactattttaaactgatatcagtgttttctaaaaggcaaaataaatgtgaagggctagttttactgtggccaaactctgatgcttgcagaatctcagacatctcagatggtgatcagtaagggcaagcagtcgtgattggctcactgccaagaaactgtcagtgtcctcgctgatacctggacccctgcatgctcccagttacctgcatcacaaccaggtaatgcctgaggctccaacctgagacacctgtcctctctgacatgaggagggaataactctgtcctctctgacatgaggaggggaactcgtctaacatggaaggtaagtattcttatccccatctgacatgtgaagaagcgaaagctccaggataggtagtgttcccaaattcaaacccaggtccgactccagagttcttttttctgctactctgtttgtctcaggtagggagacttgttttcttccctcatcatctttacctgttgtagaattactattaccggtgactagcattctttgctcactatgtgctaaccactgttctcagtgtgcgatgaatatggtctcctttagtctttactacagccctatgaaatagtatccttattatcattcccattttatagatcaggagactgaggcataaagagattaagcagactgtccaagtccatgggatataaatattggtaccaggacttgcagattaggaaacaggggctgaaagaaaaccatggatgggttggcttgctggggtgagagtggaggaaggggatgttggaagttttggagttgagaggccggaaggtgggtgggtcagtttcttggatgccacagaaggaggagggccatgagccagggatgtcagggaatggggagaatggggtggggatgtgtagatggcaacagggaggggaagaggatgccaggtcctgctgtgtgaactgcagaaatggaaggtgtctgtttacagtggggaggggaacagacggggggaagcaacagtcataggtatgaggtacagcgagaccttcagtttgggaaatgtgagaaaatgaacagactggccttgggaaggcagtggtgggattcatccagctgtggaagtgaggggacattcagagagctcagcctatgggaaatgttgatttcactgtgagttctgaagggccctgaagaagtgttggggactcaagggaggggcctggggcaggtggggctgaatcgctttggagatgagaacctggaaaatcacagaatgccaggaatgagtttgttcttgttttcataattttagagaggtcatttatcaatgagtatattttgtgataaaaaaaatttcagattcggtatagatgctcctccacttacttcatcggttacttccagataaactcatcataagctgcaaatatgctaagttgaaaacacatttaatgcacttaaccttccgaacatcatagctgagcccagcctgctttaaacaggctcagaacactcatatgagcctacatttgggcaaaatcatctaacacagagcctattttataataaagtgttgaatatcttacataatttattgtattagattggtgcaaaaaagtaattgtgatttttgccattttaaaaattgcaggccaggcgcggtggctcatgcctgtaatcccagcactttgggaggccgaggtgggcggatcacgaggtcaggagatggagaccatcctgactaacacggtaaaaccccgtctctactaaaaatacaaaaaatcagccaggcatggtggtgggcgcctgtagttccagctactcgggaggctgaggcaggagaatggcgtgaacccgggaggcggagcttgcagtgagccgagatcgcgccactgcactccagcctgggcgacagagcgagactccatctcaaaaaacaaaaacaaaaacaaaacaaaacaaaaaaattgcagttacttttccatcaacctaatttactggaagtgaaaagcagaatggttgtctgggcacttgaagtacagcttctactgaatgcgcgtcatgtttgcatcaccttaaggtcaaaaagggtaagtcacaccatcataagttcggaactgtctgtattttcattttcttctattttattctacatttaattcattttcacattgtggtaggagatctaccctctgaacacatttttaagcatgtaattcaggggcaatgctgcatagcaggtccctcaagcttacgcatctgtacccactgaacgactccctgtcgcactgtctgcagcccttggcagccaccactcaactttctgtttctgtgagtttgactgtttgagattctgcatccaagtgagatcatacagtatccttttgggactggcttatttcccttagcatagtatccttcaggttcatccacaatgggacatgtgtcagagtttccttccttttaaaggctgaataatattcgatcgtctggatagccacactttgtttatccatcatacatggatggaccagactggctttcagcttctggtggtgtctgaggtaaacccagttgtgaggatgttatgaactctgcactagttaaggtgctgaattctaagcttgaggacacacatggtggtgtcgtggccctgcgtttcccgggagtacatgatttagtcagggctttggagtggggccaagggttttctgtgactttctctgttggcacaaggtgcagtgctggtttggggatggcagctctcctgggtcctccctgggtgcctgtggtatagacagtggggagctctccctgcacctccccgaagaatactgacatctttgccaactctttccatccaggtcctggctgtctctccagttctccatgtcctctcttccttttatttgggctcttcccctgaagtttgctatttcctttctccctccttccctgctctcctctcctcctttcctttttgttgagtttatacctttgtttatgccttccctcccttcctctcttcttctctcccttcattccttccttcctttttgttgagtttatgcctttgttttatacttttattcctattgtgaatgggattctttattcattgtactttgttcttattttctaacatatggactatttcacgactttgaatgtcatccttacacaggaaccatgctaatcttctctgcatcattccagttttggtattagcactgtcactgactatattttctaattagatactttaaaaaatatttagtttggaactggctcgctcccttaccatcctctcttcttagcactaatggttttcagttgattctcaggtgtcttccaagcagacagtcatatcagctgcagataacaatgccttttgtctcctccattccaggagttattcttttatttctggttcttgctgttttgtgcatgtgtgaccccagttgtgttaaatgctagtgacatcttgacttgctctcactttactgtgggtgattttggtgttttctgattaaatatgatgcagaaagttggcttggggctttgttttacatgttaagtcttctcctcctatattcctttgagttattaggatttggtcatggcttttattaaatgccttctaggcatgctgttattactttgattattgcttctctttttaccctggagtctcctccaggaaattaaagtatgtgtgtatttggtctcctgggtatttcttccatgtcacatatgttatctctgattcttgtgatcactttcattcatgctctgatttttcaaagtttatcatctaatgtgctttgctttgtatgtttcttttcttcaactattatgtttttaatctttagtctgatttctgtgctttcaaattatttcttcatgacttcttgctcaactttcatagctatcaaatcttgaatttcaaatgagaatgcaaattgcagatttttttgaaatctcccatttctaccagtaactttgtttcataggtgcatatttacttggaatcctcagctgctcccccttttatgatctgccagagctttccagatagatctagagagttttctgtgatcacctatctttacagagggaagctagtattggtccaaaaatcagaaattgagagggatactactggagaatgtgtggttatcaggtcatctttttttttttttttttttttttgagacagactctcactcttttgcccaggctgaagtgtagtggcgtgaccatagctcactgtagcctggagctcctgggctccagcagtcctcttgcctcaggctctcaaagtgatgggattataggcgtaagccacagcgcccagccaggtcatatcatttacgctctgtcgaaggaagaggaaaaatttttgcattatctggggtgaaagtaaggagggcattaaagcctgaagtgcaattttgccatttttttcttttctatgtattttgtttttgttgttctcattgttactttagtgcctgttggaaggtggccttgtcctccccttctgcttgcatgatggcccctgttcttatcagctggccatggctgtttcccttgtgtggccttctgtgcatgcaggcaaggagaagggaacactagcaggccttctgaagctgctcatggcagaggcctcaacttagtagtccagttacccttttaaatgatgacgattctgtaatgtgccctttaatatcctaaaatgaaattcaccagtccatatacattactgaaaaaaatcaatataatgctgtacctataatgtagagaagaaataaaaggcaaataatttctaatgaagtgacatatcagtgtgtaagtgctggagcctgactccactagaagacagatgcttgtacattagtggagattgctgccttaagcttgaatgctacaaatgagactgactcatgggtgcagtgttgagaattcaaataccaggcgtgttgacatcagtgactttgaaatgttgacagctcagggtaaacattttgaataaagcaaagtactgtctttccttaagttacatgatagttgcattcctagaaaattcagtgtataatagcaatgctgtgtgaaactgctttgtgtttctctgtaaaacagagttagattctggatgtaggtatttataactgtgttctcctattcaggagtgctgtcagatcacaaggagggagcaggaagcaggaagcaggcgtgcccctcatatttgcaaggcttggggcaagagtgcagcgggggccatctgtttattcacaatattctgatataattaaatattctagtaaaggagatcaagtgtcagggatttcagatgacctggtagcttgtcgatctaatgacaataattttcttactcattttcatcttttttttaatcagtaatgggtgaattttgtgtggtgaattttattttttcttcccagcttcccccaagttctactttagtattttctcatttttatcactttgaaatttgtaattcttctcaaaggttaaaaaaattaatgatattcaaatataattttaaaataatttttcttcaaaatagaaattaaagtcaatataaagggtgaaatatatttcatatttttaaattttttaatttaattttttatttttagagacagcgtcacactctgtaacacaggctggagtgcaatggcatgatcatggctcagtgcagcctcaaactcctggcctcaaacgatcctcctgcctcagcctccaaagttgctgggactacagccatgcgccaccatgcctggttaattttttaaatttttttgtagagacaggtgctcactatgttcctgggctgaagccatccttccatcctggcctcccaaagtgctgagattatgggtgtgagccactgtgcctggcctgttttgtttttttttgttttttttttttgagacggagtctcactctatcaccaggctggagtgcagtggcaccatctcggctcactgcaagctccgcctcccgggttcaagccattctcctgcctcagcctcccgagtagctggggactacaggcgcctgccaccacgcccagctaatttttttgtatttttagtagagacggggttttaccccgtgttagccaggatggtctcaatctcctgacctcgtgatctacgcacctcggcctcccaaagtgctgggattacaggtgtgagccaccgcgcccagccagatttcttttttttttagctgttgaattttgtgagttctttatatgtactagaaactagttctttattggatatgtggtctgcaaatatgttcttccagtctctcttttatcttttcaaccttataacagggtctttcacagaccaaaaattttaaattttgatgaagtccaacttgctaattttcccttctatagattgtgcttttgatgtcaaaattctttgcctagagccagttttgttgttgttgttgttgttgttttgtttgtttgtttggttgttttgagacagagtctaactctgttgcccaggctggagtgcaatggcacaatcttggctcactgcaacctctgcctcctgggctcaagtgattctcctgcctcagcctcccaagaagctgggattataggcttgtgccactgcgcccagctaatttttgtatttttagtagaaactgggtttcactatgttgctcaggctggttttgaactcctgacctcaggtgatccacctgcctcagcctctcaaagtactgggaatacaggtgtgagccactgcgcccagctgcctagagccacttctttaagattttctcttatatttttcccgaaagtcttatagttttacatttacatttaagtgtgttattcatttttagttaatttttgcaaaagttgtgagacttgggtcaaggttacttttgttgtggatgtccagttgctccattgttggaaagggtatcctttctctattgaatcgcttttctacttttgtgaaaatcagttggggctgggcgtggtggctcacacctgtaagcccaacactttgggaggctgaggccagaggatggcagcctggacaacacggcaagatcccgtctctacaagaaataaaaaaattagctgggtatggtggtgcacacttgtggtcccagctacttgagatgctgaggtgggaggattgtttgagcctgggaggtcaagtctgcagtgatatataataacgccattgcactccagcctaggtgacagagcgagaccctgtctctattaaaaaagaaaatatcagttgggcatacttttattctgggttctccattttgtgttgttgatctatatgtctgtccctctgacaatgcctcatactgttgattatggtagctttgtaatgtcttgaaatcaagtagactgattcttcctactttattattttccaaaattgttctagctagtctagttcctttgacttcccatataaatatacctacaaagaaatcttctgagatttgatagtaattgtgttgaacctgtaaatcaatttggggagaattcacatgtttttactatgttgaatctcctaatccataaacatggtatggctctccatttatttagatctttgatttctttcatcagcattttgtagtttgcggcatacaaatcctatacctgttttgttagatttacacctaagtatttattttttatttttgaggaattgtaaatgatactgtatttttaattttggtgtttgtgtgttcattgctagtatattgaaatgcaattgatatttatatgtttgccttataccttgcaactttgctaaagtcgcttattagttctaggaggattttttgtttgttttagattccttgggatttttcaatgtaaacaatcatgtcatctacaaataggtacagttttatttcttcctttttcttttgagtcgttttcttcctctgttgcccaggctggagtgcagtggcatgatctcggctcactgcaacctctgcctcccagattcaagtgattctcctgccttagcctcctgagtaggtgggattacaggcatgctaatttttttgtatttttagtagagacggggtttcaccatgttggcgaggctggttttgaacacctgacctcaagtgatccacccaccttgacctcccagagtgccaggattacaggtgtgagccactgtgcccagccaggacagttttatttcttcatttctgatctgtatgccttttatttccttttcatgtcttatcacactggctagaaagtttaacactatattgaataaaagtgctaacagtagacatctttgtcttgttcctgatctacgtggaaagcattcagtcttcttctttttttttttttttttttgcttttttgaagatggagtctcactctgtcacccaggctggagtgcagtggcacaatttcggctcactgcaacctctgcctcccgagttcaagcaattctcctgcctcagccttccaagtagctgggattacaggtgcgcaccaccacgcctggctaattttttgtattttagtagagacggggtttcactgtgttgcccaggctggtcttgaactcctgagctcaggcaatccccgcccgccttggcctcccaaagtgctgggattacaggcgtgagccactgcatccggccaagcattcagcctttaaccattaattatgtaatgttagctttcgggagtttctgtagatgctctttagcaagttgaggaatttctcctctattccagtttttctaagatttttttttttctgagaaatgtccctctattccagtctttaccatgagtggattttgaatttgtctaatgttttctctgcattgatagatgtgattatgtgacttttcttagcctgttaatatggtagattacattgactgatttttcagatcttgaacctgccttgtaccctctaaagtccacttggtcgtggtatatgattatttttatatattactgaattctatttgctagtattttgttaagaatttaaaaatctgtattcatgagggtctgtagtttgcattttttgtactgacattttctggttttggtatcaggataatactacttcataaagtaaactgggaagtattcctaacttttctttttttctggaagaaattaggtaaagtttgtgttaattcttcgttaaataattggtagaattctgagtgaaatattctctacttagaagtttgtttgtttgtttgtttgttttcatttttttttggcttttttttttggtgtgaaagggtgagtttaaaaaaatttcaaattcaaatttccctaattgttatagggctactcatattacctgcttaatattgagtgagttgtatttttcaagcagttggtccatgtcttctaaactgtcaaattttatgtgtagttatttatttatttatttatttatttatttatttatttatttgttgagatggagtctcgctctgtcacccaggctggagtgcagtggcgtgatctcggctcactgcaagctccacctcctgggttcaagccattctcctgcctcagcctcccgagtagctgggactacaggcgcccgccaccatgcccagctaattttttatatttttagtagagatggggtttcactgtgttaggcaggatggtctcgatctcctgacctcgtgatcctgccgcctcggcctcccgaagttctgggattacaggtgtgagccaccgtgcctagccgtgtgtatagttattcatattatattcccctttatcctttttgagtctgtggagtctgtagtgatatccccagtttcattcctgccattggtaatctgtatattctttctctttttttgtcagaagtttgtcaattttataattttttttcagaaccagctatttgtctcactcgtttttctctatttttttttcccatttcaccgagttctgctcttctttattatttccttatctgaaaaacagagctagtcttacccatctcctacagtgtgagaattaagtgaaatgacaaatacacgtacctaggacagaagcagaagtgtagattattttgtaaaatgtgatttttttcccccttgaactagctcccttaatagaatctcctacttaggaatcatggcagttaaaaaaaaagaatctacctgccttagtgtggtgtaccttgcccagtgtttcaggctttgctttcttaagatttttcttttttttttcaaaatcacacttgactcatgttatgtctagatttacatatacataaatttgagaggaataagaatagtttagtattgcaaactactcctcggccaccatggctcctgttgcaaacactgcagggattcatgaatattccagaaccacctgttgggatggaaagaaaaagaaaatggaaaatggaacttggcacctctggcaaagtgtaagaatgtattgtattcatcctatctgaaaccagtttaacagactgaatcttttgtgtgatctgttgtcaaagcccctcccggctttgcactccgtattcccaaccagaccagtctccactgtgggcagtggtacaactcacaaaccctcacagcgttcagacgcactcttttttgtttcaaggacaaggaaaagagatgtgaagtgtttcttggggcccagatggtgttattcataacagttgatggttagggttacaagattatatattcccatatagaatattcacacattatataagtattacttcatataatgtttatatatgtttaaatataaacatattacaaacatgtatatatttatgtaatataaatataacaaaatatagtataaaatatatattatatattccctatgtatatataataaagccacacctccaatttcaatccaaccactcagggttctttctagccttgcccctttctctgcttgtaaccatcatctctggtagtagtgagaaacatggctgccagtatcctcaatttatgtacctatttgctcaatataaccagtctcaaatccttctcccacctgccacctgcacccaactccccattccccaccctccagcctcactgaccaacccacccctctgcatgactccataacatcctttcactgccccatactcagctcccatgctgaccccttgccctgggaagggaaaaaaaattgggcacaggagctttttaaaaatggtatattataaagccaattaaatgtgcttcgtacttctagttgtttgcattatcagaaagcaagatttcctgctttctttgttgagaaaggtacttcttattgcttaggaaagttttgttttatttttttgagacagggtctcactatgttgcccaggctagtctccaactcctgggttcaagccatcctcctgcctcagcctccagagtagctgggaatataggtgtgagccactgcacctgacatgttgcctagaaatgctgaaatgggggtgaatgagaaatgctgtccctgcaggtaacttggtcaggttccagtatcccatactcccttatggaagaggagaaaagggaaagaattgtaggatcccaccatataacaagttttatgttccagaagaaagttctgcttttctggttctgtgtaatcatcacattggatggaagggaagctgaaggtctttccactgaattcatggaatattaaagttccagtccttgaacttgggtgtgaccttctgaaatgttcaagtttgtcagtggaaaacatgatcagatctcttatgctgcttttcctggctgctgacacacagtagattctcagtgttgtgtgttctcttttcctgaaagtttgtgcatgttactgagtttgccattgaattgtctttgtttgcatattgatttccacttcaaaaagtagtttaatactgtgaaagtactgttcctaagcaaattacagtacagatggtcagagtagaagtgtgtactcttgatacttccctcttccccctcaacagtggaatcttgctgggattttgtcagtgctgtttagatgggacgtttatccttatttgatcaatcccaaaaggcagcccctttgtggtagttttatactgtgaaaattagttttggaacattaagccaagaagtttgcaataaaatcaaatttgtttatgtattcatttgagacagggtcttgctgtgtcacccaggatgcagtgcagtggtatgatcatggcccactgcagccttgacctcctggtcccaagtgatcctcccgcctcagcctctggaatagtctggatggaccacaggcatgcaccaccatgcctggataatttgttatttttgtagacagagtcttactatgttgctcaggctggtcttgaactcctgggctcaagtgatcctcctgccttgacctcctacagtgctgggactacaggtgtgagccactgtgcctgatcccaacatacatttaataatctacattgcagggaattacattaggaaccatgtgtgggggaccagaagataagacttgcacgtagtcaatgcagtaatgagaagaccataagaaaagtctgtataagagagggcataggcatgactttgttctgtcctcttggccacatcctggctgtgtgaccttaagcaaattaacctaccaactacaaccattccttctgttgggaggagccaaatctgtgggagtggaaaaatcactgagaagaagccaaactctaggatgttgctgtagaaagggcctacacaccctgctgtagaaagggtcctagagtttggcttattttgtgtactggggatcactatgtctccttgcaaaccattgcactgggcgcggtggctcacacttctcacacttgtaatcccagcactttgggaggccaaggcaggcagatcacgaggtcaggagttcaagaccatcctgaccaacatagtgaaaccccgtctctactgaaaatacaaaaattagccaggcatagtggcgcacgtctgttaatcccagctactcaggaggttgaggcaggagaattgcttgaacacgggaggcggaggttgcagttagccaagatcacgccactgcactccagtctgggtggcagagctagactccatctattaaaaaaaaaaaaaaaaatctgtcttttcaaactctagtcttttatcaggtaaacattttctaagttttattcattttttttggaacaagtaagacagtttacttattcaaaatgtaaagggttacagtgaaaagttttgctcctgcccctttgcccagccaccaagttcacccaccagtggtggggaatgtggtatctttctagaactattcagtgtgtctggaagcaaaaggatatccttttacctttctgtatgcaaatagtaacgtaaatggacacaccattctgcacgtgcgcattttctcttttcagtgtattttggaaatcattcctatcattccataaagaacctcctcgttctggtccccatctctctggcacttgttttatgatttctcagtggttactgatagcagttcacagcctcattcccaagttatctccgtgtttggggtttaatttccctgggccaggatatttacattcatgagatggtttccttggactttagtttcctcccactaaggtttgagctacactttgcaaatgggcaaagaccatttttggatgtatatgcctgagggaagacagaaaaacaaagctgaaagagcatccagagggtttgccttcaccatcggaaaccactcagctccttttcagggctagcttttcagactgctttccgagatttctgcccactcctgtttggccatggccgtgtgccctattttcagtttctatatatgccctcatgttttcctgagcacatcaagaacgcctgcacggttacactggtttatttaggaaccgtcccctttcttcttcagtctgtcagttactcatttgaggtcagactcacaattctgcgaatgtcttagcctcttggaggagcatcgtgtgtgatgttggacaagctgcttagtgtctctcagctggtttcctcatccataagatggagttaatcgtgcccattacagagaattgtgacaagcaaatgaaatgacacatctgcagaactaagagcagaaactgaaatatagatatttttataaaatgtgatttttccctcaaataatcttctttaacagaatatcctacttaggaattatggcaaaacaaaaacaaacttaaaaaaatccacctgccttagactcttggtcatcttttaagattcttcaagttttgctttctttttttatttcctttaaaaggtttttttaaaattaaatctttattttatttattattttgttttttgagacagagtctaactccattgcccaggctggagtgcagtggcacaatcttggcttactgcaacctctgcctcccgggttcaagtgattctcatacctcagcctcctgagtagctgggattacaggtccatgccaccaagcccagctaatttttgtattttttactagagatgggttttcggcatgttgaccaggctggtctcgaactcctgacctcaaataatccgcccttccacctcccaaagtactaggattacaggcgtgagccaccgtacccagccctttattttattttatttttatgcaacagggtctcactctgttgcccaggctggagtgcagtggtgcaatcatggctcactgcagccttgaactcctgggctcaagcagccctcccaccccagcctcctgagtagctgggactacaggtgggcaccttcatgcccagctaaattttgtttgtagagatggggtgtcactatgttgcccagggtggtcttgaactcatgttcaatcaatgttcctgctgtagcctcccaaagtgctgggattacaggcatgagccaccaggcctagcttgagtcttaatttttttttggagtttccatacaccctctgcccccacacatgtacagcctctcccattatcaacatcccccaccagcgtggtacattgacatgacagatcattgtcacccaaagtccatagtttaagtttgggttcacttttggtggtgtacattctgtgggtttgaatgaatgtataatgccacgtatcggcaattgtaatatcacacagagtagtttcactgcccccaaaatcctctgtgctctgcccgttcatccctccctcatccctagtccctggaaaccactgatctttttactgtcccatagttttgcctttcctagaatgtcacatagttggaatcatacagtatgtcaccttttatattggcttctttcacttagtaatacacatttaagtttcctccatgtcttttcatggcttgatagttcatttctttttagcactgaataatattccattttctggatgtacaacagtttatttatccattctcctactgaaggacatcctggttgcttccaagtgttggcaattatgaataaagcttctataaatactcgtgaagctttgctttaagatgacatgtttttttctccccaagttaccatcacttatcaaccagttcttttttggtcaatattaaatttttccatttttggctccaactagtaaaaatagggccagattttgactaatagatgaaagaatattctggttagctgcagcaattcagagacaagcatgttgctccaggaagtaaggaactccatgtgcttgctagagaggtactcattctctacaagtggaggagctatggagtgacaggattggaagactttcatcaaagtcctttccaaccctgaaggggctgctattaaggtcaaagacctgttcttgggtacattttcttgtatcctcccatgtgggaagctctgttccaagcctttgggttacaagatagacagaagtccttgatgattcccaaacctgcatctcggatcccaacttgcccgttgtactccagaaacactcctcccactgtttgctgaaaatgtctggggaatattctgcatgtgtattcattcattccttcaatacatatttagtgtctactatgttccaggcatctttctgggtgctagggatgcagcagttaacgacaacaaaaaaagtccctgctctcatggatcttacatttcattctcaacatgtcttaaccaaacccatcatcctcgtttcattatagagttgtttaactgctttctctagcatctggatttgtcctaactgaagtggcatttctcagtcctccagatacattctagtgttatctttattaacttcctttctctcaacatgtaattgtcatctacagttgcatcttacacttcttatttatttatttatttattttttgagacgaaatctcgctcttgtctcccaggctagggtgcaattgcgcaatctcggctcactgcaacctccgcctccccggttcaagcaattctcctgcctcagcctactgagtagctgggatgacaggtgcccatcaccacgcctggctaattttttgtatttttagtagagacggggtttcgctatgttggccaggctggtcttgaactcctgacgttgtgatccgcctgtctcagcctcccaaagtgccgggattacaggtgtgagccaccgcacccagcccacttctttttatttcttttgcattcccctgacttcacccaacacagcatctcttacccaaagcacagtagcttcctgacttgagttgctgctggtggttaatgcttactctctcgtcctatgtgagtaggatcattttcggcccatcaattgaaaaagttggctaaaccagggaaacctaaaaaaattaaactatacttttaaacattttattttcacccaaaacatataactgcacatttgttcactcatctttagttatagagccaagacattgtcttacagtggtcttgttgattgaagtttttttaaacatctttccattcttatatctcctatgatttccagttttagtttttttaaacatgagaaagaacgaaaatacttaagaggaagattggatactgaatcctttcacatgtttgcaaatattcctctattataattgcttcagccatttttagtgactcatcttcattgagtcttttcaaaccattcagcatgtcttttgaggaagcgatatctctccctctttgtactcatatttcactagttaatgtacaaagttatggaaataaatttgcaagtacaactagcataaataggtttgggaacaaatatgcttgactcttactatgaagacaacccacatgatgggagcatgagtgcccaggtgtcccagagaggagactaccagccaaaagtgttcatcttgccaagggtgtcagtcagtgtgtcctgtaaacatggggtgcattggttattttggtgaattgattatctgtaaaatgttcagtagagagtgcataagagagcaacttctgtattaccagagtaatcttcctaagccacagctgtcatgagatcacttctctgctcgaaaaccttcaagcactcctcactggttgaggggccaagggcaacatcttgccttgtgattcattgtgatctatggctgtcttacctccctcccccgttggtgccttgactgtgaccttttcacagtcactctggtgaacaacgacggggcctgctgccggggccttgcttgtctaggctgtgcatgtccaagccaagcccctccctccctgctgcccccttctctcctcctgccactgcagaccttgatggatatgctgttcacctggaaaggacccgctcatagtagcacctccttcaaaaagcgtttcttgagctcctttcaacagggcatgctttttcctttaaaaacccttctgcagcaccccatgtgtatttgttaagtcactcccatatcctacctatactgcttctcctgcctaataactctctgttgccgtgagttgaacccagctcactggacctgctcgctgctcattcagcaagcaggcaactcctgagtatgggcgatgctgtcccctttatctcctcttcttcaaagactgtgtgtctttgaatgcgagctcaccaggctcccccaggcttcagtcatgctaactgattcagagcgaggacatggctcttttgaggttgtaaataatacatcaagtcttgaaggcttatctgcttgtctcccttgactttttcaagaagcagctttattgataataatttacataccataaaattcacccatttacagtgtgcaatccagtgaattttagtgaattgactgagttacaaccatcaccgcagatgagttttaagatattcctgtcactccagaaataccccatgctgctgtttccagtcaatatctgtttccaccaccagctccaggcaaccactaatctgttttttatccgtatagctcctcccttgactctccctgccacttcctcagaattggagtgttttctggactaatgtgtgtgctatttgcctaaggaacttttcttccgattcagttacgtaactttgtgatcttctctttcactcattctccccatgttcaagtttctcttggttttctttgttgtgtgaacctagtctctgttcaccgagttggcctttggcttattaagaaaactgagctttttcccctctttcagaatatggaaaacttgaatagtgtcatgtacaaatattgtagtgtcatgtacaaaccagatgctgaatgttatctaccgaatgaaggaatctgagccctgctaaggcatgggaaatcttgtcttctgttacattcagcatagtgcgtgtaaagtcactaaattattattttggttaataaatactttttattttttggtaaggaaaattacattgtttttattaagatgattcatgcttgatagcttaaagagtacaaacaaagtaataccttaaaaagaaaagtataatatgatccagtatttccacttctggttatatacccaaaataattgaaagcaggaacttgaaaagatatttgtgcgcccgtgttcttagcagcattgtttgcaataactaaaaggtggaagcaacccaagtgtccatcaacagatgcgtagatcaacaaaaatgtggtatatacatacaacagaatgtcaggccagccttaaaaagaaagaatttctgacacgtgctacagcatgtgctacctcaaagacattatgctgagtaaaaggattgtgtgatcattcctatgagggacctagagtcaccaaatccatagagacagaaagttgaatggtgattgccagcggctgcgggaggagggagtagagagttattcttttataggtaccaagttttggttgtgcaagatgaaaagagttctggaaatgggggtggtgatggttgtacaacaatgtgaatgtacttaacacctctggactgtacactaaaaatagttgagatgccagcctggctgacacagtgaaagcctatctttaccaaaaaaaaaaaaaccaacaaaaattagccaggcatggtggtgcgtgcctgtagtcacagctactcgggaggctaaggcaggagaatcacttgaacctgggaggtggaggtttcagtgagctgagatcgcgccactgtactctagccttggttgacagagtgagaccctgtctcaaaaaaaataataattgagatggtgagttttatgttacatatattttaccacaattaaaaaataaaaataataaagggaataacagaagaagaacagagaagaaagttaaagtactatctgaaacaccacgtcttagaaacaaccagtgtttgccacaggaatattctttataggaaaaaaaaaaaaaagcctgggcaacgtggcaaaaccccatctctatcaaaaatacaaaactttagccaaccgtggtggtacgtgcctgtggtcccagctactcaggaggctgaggcaggaggattgcttgagcccaggaagtcgaggctgtagtgagctgtgatggcactactgcacgccagcctgggtaacagagcaagatcaagtttcaaaaaaaaaaaaaaaagtccgagcgtggtggctcatgcctgtaatcccagcactttggcaggccgaggcgggcagatcacttgaggtcaggggtttgaaaccagcctggccaacatagtgaaaccctgtctctactaaaaatacaaaatttagctgggcatggtggcacgtgcctgtaatcccaggtacttgggaggctgaggcacgagaatggcttgaacctgggaggcggaggttgagccactgcactccagcctgtgcaacagaggtaagactctgtctcaaaaaaaaaacaaaaaaacaaccagtgtatggggatggttttctaagcatctctttcagcggtggtaccttcgtaacgacaaataccagtacaggttcagagtagggggaatccattcagagtccttgagaggaggcctgcagcagggatggggggctgatcacgcaaggcaggaaagttgtctgtacctgcagcagtgagtgcctgataggcctgtggggcggcttcagtgcccaccacagggcgtgggggagcccaggcaacagggagcctccttctgccattagtggagggaggggcctaggctgctgaggttgagcttcccaagggagttctgtagaggagagaataaagagcacactatgtgagttcactgagagtcctcgctttgagaaaaggtgacacactcctgggactcccagaaatactgcgggaactttgcagttgggacgataagtaaatgactagggccagaaaaatattatttaatactgtttttttcttttctttttttttttttttttttttttttttgaggcagggtctctgtctgtcaccgaggctggagtgcagtggtgcgatcacagctcactgctgccttgacctcctgggctcaagctcaagtgattctcctgcctcagactcccaagtagctgggactacaggtgcataccatcatgctcggctaatttttttactttttgtagagatgtggtctccctgtgttgcccaggctggtctcgaactactgagctcaagtgatcttcttgccttggcctcccaaagtgctgggattgcaggtgtgagccactgtgcccagccagtactgttaacatgaccccattggtacccctagacttgttggtctagggaaacatgagacacacaaaatacataggaaggtgttcagcctataattttcctttatatataagtgaacttcaaaatcttgaaggccaatgatgactttgatttttctgttttagcaatagggtcttgctatgttgcttagattagactggagcttctgggctcaggcaatcctcctgcctcagcctcccaaatagctggggctactggcatgcattactatgcctggctcaatgaagattttttatatttgtaccaaggtctcaaagaaggcagtgggcagataatagaggtgtcacacgctaggaggatggatcacctaatgaatcagtggctgagacaagtacagaggttttttttgtgtgtatagttttatagtgattgatatcagtcttctttcatttagattatagcaaggttattcatatttaagttaagccctattaaggctaaaaacattctaattcaagaaggatgttcaagattctctccttaaagatattacatattttatagtttgctgtttaaagaaactatttgttttctgtgaatcctgaaatgttgatttctctttgaagattctgtgtccagcttctactggagacaaagtggtttagtgtaggaagaacgagtgcttcagtggcaacaggcctgcattaaatttcagctccctacttttaatctatatgaccttgggcaagatagcgtaatctccctgaacctcggtctcttgcttgtaagtagagaaaaagaatggctactgggtcagaccacaccggattcgctggattgtaacactgaggaagtgtgccaagtgcgtaacagaatggaaagtaggtaactcagagggtgtttaattcaggggttcggcatgccaaaaagggtgcaggttctttccatctttttggtcgaccaccctgattgtgctggcttggccctctggccagctcccctcgtcatcacgagataactactagagttctggcaacctcaaaccgaggacagagtcccatggaagaagaaggtttcagtatctctttaagaataagagaactttccccagccttcctcccagcagacctcccttcaaatgtttttggtcagaactgggtctcatagcatccttgacctagtcactagcaaggaaaatggaatcaccaggattaacgtaggctgtgcatgaaggatctactactcagctaagaacaggccaccttctctcagggccagctccctggcaggcaggaaggaaggaaggaagatgtgggaaatggctgataggtagtccacagagactgccacacttgttttgtggtgttaatttaaggtctagtttattatttggatcaggaatgtttaaaaaattaatgggctttatcttttagaggtattgtaggtttatagaaaagttagtggaaagtatagaaagtttccatatataccccctcaccatcacctccagactcccaagttactaacttcttgcattaggatggtacatttcttggaattgatgagccagtgtaagtacattgttattaactaaagtccatagtttatgttagggttcacttttggtggtgtacattctatgggttttgacacgtatccaccattacagagtcatacagagtagtttccctgccctaaaaatcgcctgtgctccacccgttcatccttcctcctaagtgcctggcaaccactgatcttactgtctctacaggtttgccttttttgtcagatagctggaatgatgtagtgtagctgaaaagaagtggccttttcagaccggcttctttcacttagcagtatgcatttaaggttcctccatgtctttttgtgtcttgatcatttctttttagtgctgaataatattccattatatggatgtaccacagtttatcattcaactattgaaggatatttttgttgcttccaagttttggcaattatgaataaaactgctataaacattcatgtgcaggtttttgtgtagacctaagttttcagctcatttgggtagatatcaagaagctcaactgctggatcttatgataagaatatgtttagttttgtaagaaactgacgctgggcatggtggttcacgcctgtaatcctggaactttgggaggctgaggcgggtggaacatgaggtcaggagttcaagaccagcctggccaacatggcaaaaccctgtctctactaaaaatacaaaaaattagctgggcatggtggcgggtgcctgtaatcccagctacttgggaggctgaggcaggagaattgcttgaacccaggaggtggaagttgcagtgagctgagattgcaccactgcactccagcctgggcaataagagcaaaactctgtctcaaaaaacaaaacaaaacaaaactgacaaactgtctttcaaaatggttgtaccattttgcatttccaccagcaatgaatgagagtttctgttgttctacatccttgccagcatttggtgttgtcagtcttttggattttcaccattctaataggtgcataacagtatggatcgtgatttttttttttttttttttgagacggagtttcgctcttgtttcccaggctggagtgcttggctcaccgcaggctccgcctcctgggttcaagtgattctcctgcctcagcctcctgagtagctgggattacagatatgcaccaccatgcccggctaattttgtatttttagtaaagacagggtttctccatgttggtcaggctggtctcgatctcacaacctcaggtgatctgcctgccttggcctcccaaagtgctgagattaacaggtgtgagccaccatgcctggccatggatcatgatttaaaaaaaatactggcacaaggaaatttgaactctggctatttggtaaaaaattattgttaatattttttagttgagataatggaattgtgtgtgtgttttttaaagagttcttatctttagaaatccatgctgaaatatttaccaatgaaataggatgtcttggatttgcttcaaaataattgaagctagaggaagaagtgggtgatagatgaaaaaaattggctctgagttggaaactattgaaactgagttgagaggcatatggagggccattatattagttctctttagttttgtgtatgttgcggcttttcataaaaggtttttactaattaaagtttaatcatgtattatttaaaaatgatagagacagggtgcaatggctcatgctataatcccaacacttcaggaggccaagtagggaaaattgctggaggcctggagttcaaggccagtctgggcaacatagtgagatcccatatctataaaacatttaaaaaagttagctgggtgtgatgacatgaggctataatcccagctacttgggagggaggctgaggtgggaggatcatttgagcccaggagttcgagactgcagtgagctataattgggccactgtattcaagcctgggcaatagagcaagactctgtctcaaaataagaaaaaagatggacactttggtgtttagtaaaaattaggaactgtcttctggtcctacctttgcttaagtttagttcttaacagtattctgaggaataaatgaatatttgttgaatatatatgtattagagtttattattcaaggaatcttcctagaaactgaagatttttggtaatatgataaattttacttgaaattattatttttagagatagggtctcactctgtggcccaggctggagtgcagtagtgcaatcatagctcactgcaaccttgaactcctgggctcaagtggttctcccacctcagcctcccgagtaactgggactacaggtgcacactaccacacttggctgattttttattttttctagagatagggtcttgtgctgtttcccaggctgaattttactttaaattattttaacatttatgtatttttccaaataaatgtatttttaactcaaaagcaaaaagcagtacatgtgcactagaaaaaaaaaaaaaaggacaagcaataaaagaacttatataaaggacatcataatcttgcctactcagagagggccactctcaatcagtgccttgaggtataattgttgaaaccctttccatcttatccaggtatctgtgtctatatagtttttgtttatgtacaaaaatttagaattgtattcttttttttttgagacagagttttgctcttgttgcccaggctggagtgcagtggcgcgttctcggctcactgcagcctctgcctcccaggttcaagcgattctcctgcctcaggctcccgagtagccgagattacaggcacctgccactgcgcccagctattgttttgtatttttagtagagacggggtttcaccatgttggccaggctggtctcaaactcctgacctcaggcaatcccgcctgcctcagcctcccaaagtgctgggattacaggggtaggccaccacccctcgcccagcggattacattcttaacatatgtactgttttgcttttaacttagtatctgacacatagctttagagactgcataggaagccatcatatagctgtattatattttattaaacttggacatttgtgttgaacattgtaggtttttccagctttttgctattacaaacagaaaggaggcaacgtgcagttgttaagaacacaaactctggagttaaatggcatggtttctctgcagaaaagggtgaatgtagcaggtctgggactgctgtccttagaaaggctgcttccaaggttggcacttggctcgtgtcagggaacttggatttcggaagggttcctgccaccctaattggtaagagtggctcactgcataaactgtgcaaacactgtagtttatgctgaactcctgttttccttccaggagcctatgtgatcgcctggtaaaaaccctggatgctaagtctctagtgaatttccctggcagacatttcacacgtgttgtcacagctcattgctggaagaattaagcacaccctgaatgactacactggggggaaattcatggaagcttgcacctagtttcctctggacttggtcttgtagaccttttcccttttctttgtatccttttgctgtcatatatcatagctctgagtgcaactgtgtgctgagtcttgtgagtcctttcagagaatcaccaaaccttggggtggacttggggacacaggtttaaatcctggctctgctgctttctagcggagtaaacttaggcaagttactcaccctctcagtcattttctaatctttaatttgagttaaaaaaacagttttgttttataaatcgaaatatataatgtacttagaatagtgcctggcatgtaattatttctcaacaaatgttaagaattatcttgcaagctagatgtttgtgtatatttgtaactatttcttttcttctttttttttctgagatggagtctcactctgtctcccaggctggagtgcagaggtgcgatctcggctcactgcaagctccgcctcccgggttcacaccattatcctgcctcagcctcccgagtagctgggactacaggcgcccgccaccacgcccggctaatttttttgtattttttttttagtatagtagagacagggtttcaccgttttagtccggatggtctcgatctcctgacctggtgatctgcccgcctcagcctcctaaagtgctgggattacaggcgtgagccactgtgcccggccttttttctttttttttttgggacggagtctcagctcatcacaacctttgcctcacaggttcaagtgattttttctgcctcagcctcccaagtagctgggatcatccctgcactttgggaggccgaggcgggcagatcacctgaggtcgggagttcgagactagcctgaccaacatggagaaatcccgtctctactaaaaatactaaattagccaggtgtggtggtgcatgcctgtaatcccagctactcgggaggctgaggcaggagaatcgcttgaactcgggaggcggaggttgcagtgagccgagatcgcaccactgcactccaacctgggcaacgagtgaaactctgtctcaaaaaaaaaaaaaagtgctgggattacaggtttgagccaccgtgactggcctgtaactatttctttcaaataaatttctgtaagaataactgctgagcttaaggatatgtactttttttaatgtgttctggtcatagtagtaaaatatatttattaagacagatatttggtatagaaaaaaagtctttcctaattctatatttcagatatagttatttctaataatttgctatatacatgtcaaaatttatttctacacatattaatatggacagtagaatatagaaatttttaataaaaatgggaccacatatatattattttattgtttatgcctgtatataagggatctttatattcagtgaagttccataaaaacctttttgtcttccttaaaacgcttagattataggtgaagtaaaaaatatgtaattataatgtccaagttgtcaacttagttatacctttacatttgaaattacacattatagaaatacagtaatttagaaattacagacagtccctgacttatgatggtttgacttaggattttttgactttgtgatggtacaaaagctatactgtacttcaaattttgaattttgatcttttaccaggctagtgatatgtggagctacacttttttgtgatgctgggcagtggttgtgagccgcagctcctagtcagccctgcaatcatgggggtaaaccttcaacagtactgcgttgtcagcatttttttgaatattgtttgccagcatttttgcatccatcctgtctacaaagcccatctcgacttagaatattttcagtttacaatgggttattgggacgtaacccatcataagttgaggagtgtctgtacactgttgctttttttatagtcatcacaggcgtctttgacatgtcaccctgtcaccatgatcatcagagccacttttaaggtttacatcagatacacagcacatcagcttcacttccgcgtgttgcttgattccactggactctttgattccacaggaaattttatcctgttcatataacattcaggcagttggtttttcatttgcccaggatgtgtgactgccacaacctgactgatccctgaactgctttttaaaattatccatggctgggcatggtggctcatgcctgtaatcccagcactttgggaggccaactcaggtggatcacctgaggtcaggagttcgagaccagcctgaccaacatggtgaaaccctgtctctacttaaaatagaaaaattagctgggcatggtggcaggcgcctgtaatcccagctacttgggaggctgaggcaggagaatcgcttgaacccgggaggctcttgtctttgacatgctagttctgtgggagaaaccccagctgggcctggtggctcatgcctgtaatcccagctactcgggaggcagagggaggtggatcacttgaggtcaggagtttgagaccagcctgaccaacatggtgaaaccccatctctacaaaaataaaaaaattagccaggcatggtagcatgcacctgtaatcccagctacttgggaggctgaggcacgaaaatcacttaaacccaggaggcggagattgcagtgagctgagatcacgctattgcactccagcctgggcaacagagcaaaactgtctcaaaaaataaaataaaataaaataatacaagcattgacaggtacagaagtaccatgagggagacagcattgaattctgtctgagatgtgcaggcagaccaaaggggggtgataacagagcaagaatttaaaagatgatatatattactctgcttcagctgccataaccaattgcacagactggatggcttaaacagcagaaatttatttctcggagtgttggaggctggaagcctgagttcagagtgccagcatggctgggttctggtgaggagtcttcttggcttatacatgccaccatctcactgtgacctcacataacagaaagagagagagagaaagatctcttcctcttctttttttatttttatttgttttattttgttttgttttttgagatggagtcttgctctgttgccaggctggagtacaatggtgcgatctcggctcactgcaacctctgcctcccgggttcaagcgattctcctgcctcagctgagaaggtgggactagaggcacgtgccaccacgcctagctaatttttgtatttttggtagagatggggtttcaccatgttggccagatggtcttgatctcttgacctcgtgatctgcctgcctcagcctcccaaagtgctgggattacaggcgtgagcctccgccagcctcttcctcttcttataaggccacctatcctgctagattagggccccccacccttatgacctcatttaaccttaattacctcctaaaggccctgtctccaaatactatcacattgtggggggtagggcttcaacatgaatttaggaaggacacaactcagttcacagcagatgaataagcatttgccaggcagctcagttatggacgaggtgttgaaaccgacggaatatagcagatatgaaagcatagaggcctgaaacaatagggtgtgttcagggagctacagctggctcaacattgctgtaatataagttgggagggagaacttctgaaagctgaggctagaacaataggggtggaggtggagcacatgattatgaaggaccttggtatactaagcttagaaggacttcatcttaagggtagaggggagccacaggaacttctaggcagaggcatggcgcagtcagatttgcatttttgataattcaggtggaggagcaatttaagtagcagcgaaagtggaagtagtaagttagttgggaagctaatgcagtagcccttgtgaagcaaagatgcagcaaagacaagagaggcaaagtctggaaaatgttaaggtgatgaaatgtgcaggacttgactagatattttaaatgtgggaggtgagagagccataggagtccaggttgggttggggtcttacttgtccagtttccataaagagacatgttaattacttgacattttacagaattagtatattgactcattgatttccaaaactctttgaataagtatgtaactgttctgtagattgaagttgtgtcactcttaccatgatcacaaactcaggctctgcctatcattttggaactatttggggaagtcgaccatcttttctgggctagttacctttttaaaaggggagggagttgcacttggtgtcatatgcatttctgctctaacattgtttcctgctatttattttccttagtatatttgcttgtacatgctcagtattgtgctgtgttttatagattacagaaataaaactgtgactcttgtctttgacacgctagttttgtggcagaaaccaactcatggtactatactaccactaaaaagaagtaatgtgtatttaagggctaatttgtgtctgctgcctgcagcctatacattggttcattcatttgttttcattcatttgttccgagtctctgtgtttataaagtttacactctagtggaggaacaataattagtaaacatgtagtatatggaatggtgatcagtgtcacagaggccagcaaagtaggagagggtgtgtgctgagggtctggcttactatttaatgtggtgcgatgagagaagcccccttagtagggtgacatttgagcaaaggcccagggagtgagagagggtgagacataaggtctatgcagtgtaggtgtcgggaggaagaatgttgcaggcagagggaacaccaagtgcaaaggccctgagatgggaacatgccccgcttatttgaggaacagtgaggaggccggtgtagcaacagcaatgtgagaaggggaaggtgagttcactgatgggggaagaggaggattattcagggccttggaggccattgtaagggctttgactttccctccaagtgagacagaaagacactggagcgttgcaagtgggggtgtgacatgatttgacctaggctttagaagcatcactctcactgtatgtgcagaatggactataaagaggcaagggcaggagaagtgagactggttaggaggcagttgcagtaatcctggcaggagatgacagcggcttggatcgggggtagcagtggaggaggtgagaagtgctgagatgtagggctatttatgatacacatactgacaggcgttgttgagggacgagatgtggcatgtgaaaggagtcgaggtttctggcctgagtcactggaagaacggaactgccacttatggagatggagaggactattaaaaaacctaagtggaggtgtcaagagaaggtgtcaagaaggtagttggacaaatgagtctggagttagaagagggaaccagcctggagatatgtagatggtatttgaaagccacaagttggtaaatcaaagaccaagagagtatataggaaagaggtctgttggctgagctttagtgcccagggtgggtcaagatgaggaggaaccaacaaaggggactgggaagaggcttctaggggagtgagcagaaaactaggagagggtagcatcctggaaccaagtgaacacactgtttggaggcgttaggagtaatcagtggtgtcctacgatgttgatgcgtgacacctgagaatggaccgtagtgttcaagtgatgcacgagatagaaccagtcataccactaatggtttttttagtcctaaatatttttactgcaagatttcgttgttctaagtgttttcactgtcagatgaaggatgaaagtcgttcagggtaatttccattttagtaatttccgacagcggcagaacagtttctacttacgattggtatgcatttttattattagccatagtattcattttgggtgagtacgtctttgttagcgttatttttcttcaccacctcctcgagttgttcatccattcattcattcacccaaagaaatgcttattaagcgcctgtcctgcgctagtcctaggtttctcttgtcctgataggtctagcttcacacgagcaggattttgcctttccggcggcactaggcttccgcctcaccgcagtggggtttttccagcctaccttgtgcagctgcggttctcagcatccgcgggcggaggcctgcagccggtcagccggtgcgtcccgcccacggcgcggggccttctggcagccaagaaggaaatacagatgaggtgggcggacagtatgcagatgacgggggcgggccgcgcctggcgggcggtgtgcagttgaggtggtccggcaggatgcagatgaagggggcgggccgcgagggcgggcttgatgcagatgagggggcggggcccacgggcgcgggagagcagcggctccgccggcagctgctgggaactggaaggcgcccggtcctttctttgactggagcggacccgccggacgcaaccgcctcgccagccggagccagcgcgagctcggcacggtggacacccggtccgaggccggcaagccggctggtgcccgagtcggccaagcatgggcaaccactcaggacggcccgaggatccggaaccaggtctgtgcggctggcgggggtcgcgccgcagccgcaaccccaccccccctccaggcgcccttcccccaccgcctccggctcgcggcgccgactggggcgagcgaaaggctaaggtcctggggtgtgattcttgtcgttggaatgcgccgcttgggattgtgaaattacctgtgccgacgccgcgaccagaaaacgctgctcgtcctgaacgcgcacctgggcgccggggccgccgggcaggcaccgctgggtccctgccgcggggttccccactccgcgcctggcctgcgcctagaccaggtctcctgagcgcgcaggccgccctcggactttccgggcgtttgcggggagggcgtgccccgcggcctctccctgtcggccgccggccccgcagtttgtggcgcccgcggctctgcccctcacactcacgccagggctgccccgcgactgttcctaacccagaatagtccgtgcttgttctggggtgtcgggcgcgcctctggttatcccgtttttacttcctcagtcctgagtgagcttcgtggagtcagttgggccgtagttttcgtcctctggtagctcatgtcggcccccagcagagttagatgccgataagcagggttgcttttaaaaacaaaacgaaacatttctggactgtcacgtgaagcaaaagggatttagttttgcctgaaaaatggcatcttggctgataggaaagaggtggttgacctgactctggagtccttgtgggggtggggggccggtgacaggtatgtgtttctgtgggagagtcagaactgtaaatattttccaaaggcgtaatatttgaattttaatttgaatgaggactttgaggctctgagaggtgaagcgacttgtccgagtgaccttttccggagctgggtgccgtgctgtaggacgctgggtcgtcctggcctctgcgcattgcttctccttcatctcccagcgccccagccgccccaccttggccctatcctcggggtggggtggaggcgggtgcctccctgacacttggggtacattggactggtaccacagccaggatggaaaacttggacgggctgtccaagtttcttcacaggaatactatgaagaaaaatttcaggggccagcttactgcctagaggtgactttagttacacagcacttgttcagactattttttgggcagaataaccaacaataagcatattcataaaatgaaatatgcataaaataaaaataatatacttgttataaataaccctgttggtaaaggattggttcggtaaaggattggtaacattttaaaaacacttctcattagttacatgcttgtccaggtattgtgaaaacccctgtgtattatttcctttgtgttaaaattgtgaaaagagttactcttgttacagcttttaagactgattggatgcctgtgttccaatttttttagtgaccttactttttaaagcactgtgatggataggacataaaaagaatatgtttatgccagtgacttattttattgtatttttcaaagaatgcatatcatttcagaatgggaactctgatttgctgcaaatgaagataccggatttagggcatttttaagagatggtgtctcactatgttgcccagactggccttgaagtcttgggctccagcacctctcctccgtcagcctcccaagtagctgagactacagacaaatgccaccttgcctggctagaaattcgtggtaaaaactttaaatgctggattactgtctgaaagtgtaattttaactggccttctaatgctgtgatgaaatgctgtagagttcatcactgagatcctggaaattagagctttgttaaagatgcgtgggttttcagtcggctttaccacagggactgggatgaggtcgcatggccccaactggcagttgtggtacattggactagaatctcaacaagtgcttccgagggtcatcagagcaaggggaccaaaaggatataagggggaagcagaaggagaagggaggctggatgagtgatagcagcacacaagcctgagtgtcgcatggttcccgtattgtgtcagttttgtccatggagaacagacatttagaattaagaatgtatccaagacagacaatagggataggaagcagaattagaggagttcgagaccagcctgggcaaggaaagcttttgatcatgatgcagacccaacacctatgaaagggaagcgggaggcagcaggtttgggcagggagagcctcagataatgatgcagacctgaagtcttggccacttgatgggggagctccctagcaaagcccacccattagaggggtctcaggttgggcagaaaggacagtccctagtctttctgtgggtcagtcattggccagaggctactttggaagaacgtgccttcagctcagaagctaacacaagtcttgggatcctcgtggtgccaacagctggaagctgtcagccctctgcagtccttgcagatgaatggcaagttcggttttttttgttctgttttgttttttgagacaaggtctgactgtcacctggggtggagtgcagtgctgtgatcatggctcactgcagccttgaccttccaagctcaggcaatccttccacttcagccacccaagtagctaggacaacaggcccggctgtttcgtttttgttttgtttttttttgtagagatgggattttgtttttgtttttgtttttttttttgagatggaggcttgttctgccacccaggctagagtgcagtggtgtgatcttggctcactgcaacctctgcctcctgggttaaagcgatcctcccgagtagctgagactgcaggtgtgcaccactatgcccgcctaatttttgtatttttagtagaggtgggatttcaccatgttggccaggctggtcttgaactcctgacctcaagtgatctgcctgactcagcctcccacagtgctgggatcacaggtgtgagccaccatgcctggcgtagagatgggatcttgccatgttgcccaggctggtcccaaactcctgggctcaggtgatcctcttgcttcagcctcccaaagtgctgggattacaggtgtaagccactgtacctggttaagttctttcttgaaaaagggatcccagtggaacacctccatggttgactgccacaggacctcagttgcttggacagggagagtctctttaaagagtaaagaggtaaaatccccatctgagacccgctgtaggcgttgagattgcaccatcttttccagatggaagctcctcatcccctctggggtgtttctaaggcagaaggcagcttctcagctgctgctgcttttctagccctggaattggctgtggtggcagcaggattcctctgttgtggtatctgcagtcctccgagttgggacatcatgacttaacatggtattgcagaatggataagataaatagatccagtaaaagatatgaaaatttcatgtctgaaattttcagcctgggcagagaaagttggtgaccacatctcatgcttcctaaaaggtcctagttaacagtccttcagtttccaaccaggttgtcatcacctcattgtcagggctgctgggcatggttgtgcaatttgtgtactgttcaaaggcatctgcttagagagttgagtgggcctggcagggttgtagcaacccagaggaaggggtgccgttttgcaattttgcctttttatattcacacaaaggtgcccaaagtgttaaagaagtcttagaaagtgagtttagaaggttttccctagtcccagtaccagcttattatttgttttaaatttgcatgtatgaaattaaaaagttaatgcaaattacatgaaataaaagctgctcaggtgcactctgtattagttatagttaatgctaactgtggttacagataaattccaaaatagccacttaagacagttaaagttgattgctgcctcatgtcgcatctggtgtgagttgggggccatcagcaggtggttgttagagactcaggctggtggatgctcctcttcagcatatggctcccaaattgccctgaatctgccagcagtcgggagaggagaaggcgtgtggaggaccctgcccgaggttttaggggccaggcctagaagtggtgcacattatttctacttatgttccactggccagactcagtcacagagacccactgacatgccaggggactgcatcaagcagagagcatgcatattggtaaacattagtgtctctttgtagacatgatgaccattctcaaccacatttgcatcagtattttattacaaaaattttaatcagaaaaattaagacttacatagtaaacacccatgtaccaaccacctagattctaaattaatattttgctgtatttgctttatttgtacatctctatattcattcctctacccacccattagtctgtcttattttttgatgcatttcaatgaaatggtagttacctctacaattctacatgatatactatacccttattgtttcttgatttgttagttttcaagcctctctactactaacctgcactatgaaagttgaggaattaagcacattttccctgctatatattctcctcactccccgtttctgcaagtcatacttaaattttccaaatccattgttagtataaaaatgctagtggtagaatacaagtagtggtatacagaagtttactgtaaaagtccttccactttgctatatgaaaatttcattttgagaccagcctggccaacatggtgaaaccccgtctctactaaaaatacaaaaattagtcgagtgcggtggtgggcacctgtaatccgagctacttgggaggctgaggcaggagaatcgcttgagcccgggaggcggaggttgcagtgagctgagatcgcgctactgcattccaacctgggtgacagagtaagagtgtctcaaaaaagaaaaaactttaaaattctaaggtaatctattgttttccacttctatttcttgactcaccagctttaaatagtgtcctaggcttcgtcacaggtaaatgaggatgtagtgcccctaaatgtcttctgccttattctcaagagtccccctcctgcacttattcccagtctgcctctggacctttcacatggctagaacattttcattctgttccataattagtattagtaagtcttctgtgcatcatttataggttaattctaaaaatggaaggcctatcagcatttaaaatatcaggatctcatgtattatttaatggagaaccaggtagtatgtttagatttatagagaagacagtggcatcttacattgcataacgcgtgatctgtgaagacaggaggaaggagtaaggagaatggaaaggagttggtatgaatatgctctttacttttaaaattaatatgcttttatcctgttactcagtttctgtcttttgcagactgtaagagggaatttcttttttcttaaaaacaagaagctagtctgccttttcatactcagttctgtcacttctttttttctttcttttttttttttttgagacagagtctcattctgttgcctaggctggagtgcagtggagtgatctcagctccctgcaacttctgcctcccaggttcaagagattctcctgcctcagcctcttgagtacctgggactacaggtgcgtgccaccatgcctggctaatttttgtatttttagtagagacggggtttcgccatgttggccaggctggtctccaattcctgacctcaggtgatccgcccacctgggcctcccaaattgctgggattacaggcatgagccaccgtgccctgctctcatttctgtcacttctgccctcagacttcgggcaaataattttttatttttttatatatatattttttagacagagtctcgctctgtcgtccaggctggagtgcagtggcacgatctcgcctcactgcaagctccacctcccgggttcacgccattctcctgcctcagcctcccaagtagctgggactacaggcacctgccactgcgcccggctaattttttctattttttagtagacacagggtttcaccgcgttagccaggctggtctccatctcctgacattgtgatccgcccaccttggacccccaaagtgctgggattacagacgtgagccaccgcgcccggcccaggcaaataatttttcctcgagcttcaaattctttatctaggaaagggaagagtaatataacctacattgtaggattgttgtggtgattcataggttaaaacatatgaaggcttaaaatagacacacatagaaagcacctgataagttttagctgttaattcttcttaaccctccaacataatactttggtttggactggttgctttctagtcccatctcattctcaggttagttcattatttcttggatcctttttctcttttttggattctctttgcttttgtaaaagtgaagatgtggctgggtgcagtggctcacgcctgtaatcgcagcactttgggaggccaaggtgggcggatcacccgaagttgggagttcgagaccagcctgaccaacatggagaagccttgtctctactgaaaaatacaaaattagccaggcatggtggcacatgcctgtaatcccagctacttgggaggctgaggcaggagagtcccttgaacctgggaggcggaggttgcggtgagccaagattgcaccattgcactccagcttgggcaacaagagcaaaactccatctcaaaaacaaaaaacaaagtgaagatgcatacatcaaatatcaatggtaatacatagtaaaaaatctaagaaggtcaaatatatgttactgtaataaatgtcagtgggttaagctccccattaaagagcttcccctaattaagacagaaaatcaaatatatatactgcagaaaagcttgtttatacgttactttgatttttaaaattaagtcatttaaagttgtggataataaaaaagtagctcttgaaattttcaagttcaacgtcttgttattccatatgttctatttacaaatgcagtaaaatttaataagcactctttaagagcatctggttaaattgagttctgtttacaaactttgctaataaaattaacattttaatttgtgtttattaatttagtatatttaggttcttgttaaagtctgacaaaaaaatccagtttttaaagtcttataaatttaataattattctaataaacttagtgattcttaagtcctcttatatattccaaaacatttatattctctctctctcttttttttttttttgagacagtttctgtctctgtcacacaggctggagtgcagtggcagggtcagagcttactgcagccttgacctcctgggtgcaggcggtcctctcactgcagcctcccgagtagctacgactacaggagcatgtcaccacccctggctaatttttgtgttttttatagagacggggtcttgctatattgccctggctggtcttgaactcctgggctcaagctatcctcccaccttggcctcccaaagtgctgagattttataggtgtgagccacagtgcccagcctgtattctctctttatatgtgtgtatatgtagatgcaagctttccaatttaaaattacaaattaattactcagttacatattttgaattggaatcgcaaggttgaccctgtaactctttaatagatccaattctcataaacattaaaagtataattctataatgcagatatttcttaatatggaattctattactacttgtctgattcttttgattatttccccacttgttctaaatctttctaggattaaaagatgtttacataagtgttttattccaaataatattgggatttcttcccatgtaatttttttttttttttttttaaagagacaaagtcttgctctgttggccaggctggagtgcagtggtgcgatgctggcccactgcagccttgaccttcctctctgccccagcctcctgaagtagctgggactacaggcagtgccaccatgcccagctaattaaaaaaaattttttttttggtgcagacggggtctcactgtgttgcccaggctagtctccagctcctggcctcaagcggtcctctcacctaagcctcccaaagtgttgacatttgccaccatgcctggccccatataatttttggggttgtcttctcagtttgctgaggttttttttaataaacagagatctctgacagggacaaggttgggattcttaccctacccagacttcagatatcagcttgagcaacttttgctttggttggaacatattctttaacatatttggtttgagcatattcagggatattctgtgcttgttagttttctcaaccttcatctgaggataatgttttgcccttaccctttatatactttgcccgggtatagaattcttgttcaccacctttgtaatctttctgtagcatggacttcaaaacttgaagaaagaggtgtcataatactcatgtgccttagattcaaattacatttaatttgtgtagcttctaatagcctgagacccccattcgaacggccatatcacctgattagagtttacacttctttagcacttaaaatatataaatattttcccatttaactccaaagaactttgacttgatagaatactgcctggtttttttatactttctgtctcttaaagcagtatcttttttaaaaaaattaattttattttaagttaaatttattttaaaaagttaaatttattttaaggatacacgtgcatgacatgcaggtttgttacataagtaaacgtgtgccatggtggtttgctgcacagatcaacccgtcacctaggtattaaagccccacgtgcattagctgtttatcctgatgctgtccctcctactacccccgccctgacaggccccagtgtgtgttgttccccccaccccctgtgccgtttccatgtgttctcattgttaagcttccatttataagcaagaacatgcagtgtttggttttctgttcctgtgttagtttgctgaggataatggcttccagctccatccgtgtccctgcagagggcatgatcttgttcctttttatggctgcattctgttccatggtgtatatgtaccacattttctttatccactctgtcattgatggacatttggattgattccatgtctttgctattgtgaaaaatgctgcagtgaacatacaggtacatgtatctttataacagaatgatttatattcctttgggtatatattcagtaatggaattgctgagtcaaatggcatttctggttctaggtctttgaggaatcgctgcactgtcttccacaatggttgaactaatttgcattcccaccaacagtgtatttctccacagcctcaccagcgtctgttgtttcttgactttttgataatcgtcattctgactggcatgagatggtatgtcattgtggttttgatgtgcatttttctaataatcagtgatgttgaactatttttcatacgtttgttggctgcataaatattttctttagaaaagtacctgttgatgtcctttgcccactttttaatgggttttttttttcttgtaaatttgtttaagttccttgtagattctggatattagacttttgtcagatggatagcttgcaaaaatgttctcccattctgtaggtagcagtatccttcttgacagttaaaacaaaatgtgatttaattgtggatatctttcttggctttgtctatcttacaagataattctactgaaacaatagtatcagttaaaaacacaatacaccacagagtgtcttaaatgagataggaccttttatattgataaaagtacaattcaagaataaaaagtagcagttacaaagtccactcactaaatagcaaaacactggaaataactaaagcaaaacctatttgaaacacatggaaaaactcacaagtaaagtgggagaatttaactgtcttacacaaaccattttttcaaaattatcatggaatggttaatatattgatctattctaaggccaggaagaaaacgtcattactgttgttcaagggaaattttactggtcactctgtgatcgtaatgcaataaaactgtaaataatgaaagttgacattttaaaaacttattctatttggaaattttgagtcaaataggaattgaaaactacaattatagatcatttagaaaaataattatgaaatactaataaagttacaaataataagcaaatttattcctctgaaaacttttattatcaaaaaataaagaatgaaaattaagttctacacaaaggacattcaaaagaaaagaaacaacaaaagaaatctgggataaccggagggagtttttaaaaacggcagacattaatgaagtaagttacgactgtgtctgtttcactcttctctttcctcagtacctagcccagccttgtccctgtcagagatctctgtttattaaaaaaacctcagcaaactgagaagacaaccccaaaaattatatgggaccaggcatggtggcaaatgtcaacactttgggaggctgaggtgagaggaccgcttgaggccaggagttggagactagcctgggcaacacagtgagacaccatctgtacaaaaaaaaatttttttaattagctgggcatggtggcactgcttgtagtcccagctactcaggaggctggggcagaaaaagcctaagagtatgttctttgttaaacaaatgaagtaaagttttagttagactcatcaagaaataggataacacaaataccccaaattagctatatatatgtaatgtgtatatatatattatattatatataatttatattatatatagtgtatgtaatatgttagctacatatatgtgtttatatatatactatatatataatgtatataatcaggaatgttggatattttttaaaaactagaataaaaaatagaaaatcttgatgaaattaggaaaacaaaattaccaaaatcaattcataaagaaatgaaacacttggacagaaaaatattcttggaagatgtcacaaagtgacttaagaaaatagctcccagctgggcgcagtggctcacggcctgtaatcctagcactttgggaggccgagatgggcggatcaccaaagtcaggagttcgagaccagcctgaccatcatggagaaaccctatctctactaaaaacacaaaattagacgggcatagtggtgcatgcctgtaatcccaattactcgggaggctgaggcaggagaatcacttgaacccaggaggtggaggttgcagtgagctgagattgtgccattgcactccagcctgggcaacttgagtgaaactacgtctcaaaaacaaaaagaaaatacctcctcaaataatcctgaatccagatggtgttataggtaaagtttttcatatatgagaaaaatgtaatttctgtgctatttaaagttatgtggtatgtttcccaaagatattggatattacatattacagaggatataataagatatgtacagatgattatttcttaatttaataattaacatatgctagaaaaactataacttgtacatttaatctatgtctgttgcttaggatcaggttaagtcaaagaagaaattagtcaatattaagtttatgcagaaaaatattaaacacataagacagctgaatgcaaatatagccaaaattatgaaggtgatattcaaataatagaaacttgaaaaatattccaaagtacagaaaagatggaaagcattccgatttgttttgataaaagtagtactaatactgttaatactgtttctgataccaaagcttttcaaagatggtatgaacaaagaaagccacagtatattcttactaatgtagatgctctccttaactgacatatcagccacatttaatccaaccatgcatttaaaaaaacattacaccattggctaaaaagtggcttattctaagaatgcaaaaatattattatataaatagaattggaaatatcagtacatttaaagataaaaattaacatcatactgtatgtcagtaatgcatttaataaaatttaacatctacctcataaacatttaattcctgttggaatagtctggatcttttctgaagataaataaaatgctctaaaagcagcacataccatgcttaacaggaaactaaaaacatccccataaaggtcagggacaaaacagtggtgcccatacaagactgtatgacactgttttcaaatatactagccaaaccagtaagattttaaaaaaatggttattaaaaaatgagaaaaaattagcattatttgtagatactagaattctcttgttagaataaccaaggagatcaactgaaaaagcatgagaacttatggcaatttagtaaggtaaccagcttggaaatgagtatataaattcagatatatatgtgtgtgcttgtatgcttgaatgattcagatatgtatgtgtatgcttatatgatgtagatgtatatgtaacagtagttttatgttagtaatcagaaacgatggtatattttattttatttttttgaggcagggtcttgctctgtcatccaggctggagtacagtggtgctatctgggctcactgcaacctgtgccttccaggcccaggcaatccttccacctcagcttcctgagtaactgggactacaggcatgcgctaccacacccagctaatttttgtattttttgtagagacggggtttcactatgttgcccaggctggtcttgaactcctgagctcaagtgagccacccacctcagcctctcaaagtactgagattataggcgtgagccactctggccacaatggtttgttaaaaggtttcattcacactatgaacaaaatgtataaaacctgaggaagaaataagaagtgtgcaaggcctctgtgggagctataaactatctactcaggggcatagatacaaactatctcctcagaggcactggtgttgatgtggtaggtgtcctccattaagtggaggaattatcattatatattatagttctgaaaatcagaaatagctgctgaattttccaaaatgccttttgggcattcacacagatctatttttctttttagatagaatgatttgatggatttaaatatcttcaccttacaataaactgtgtcaggtttttctaaatcttccttttggaatttttttttttttaacatgaaaggtgaattaacagcattaatttttcttggtcccttattgcgttatatataaaataagggtatgtgtgcatggttagttctaaagttcctgataattttaacattctgtgatcttatggttttagacattttttcccaagagacaggggcttgctctgttgttcaggctggtctcgaactcctggcctcaagggatcctcctgccctggcctcccaaaatgctggtgtaacaggcatgagccaccgctcatggccagacttttaaacatttctaactcagagaagtgtttggattttacctcttgaatgtgttgcgccaatttgctttaggtacgggatttctagtttgttgaattctattttacttacaaaaattttttatatggctccaatcagatcaaaccagcctatgtagtatcatagaagtaacattaaaatattgagaattttgaagggttccaggtatcctgaagactttaccgtcacaggacaaaaacacttatagggctgtccttccaccagacccagcctctgctgttccattgcccttgctgccctcctccgtccagtttgtccgctaccttcttgcttagccaggatgtgtgttgtttggcatctgccttcacatggacattgtgctgcagttggttgcttctccagctaagtaagaactgtctgaggatccatgtttatctttgccatctccatggtctccaacactctgcagagtccttagcaaaatgtatggttttaatgaattgatggcagctgtcccttgtatttccaggaaagttttgaattctcaggagaaagtaggtttgatatttcaaaacgaatgtggttggccaaatgttttatattgggattaaagaaattattttagtaccacaaacttccagaaagcttgtccataagagtttttcctcaccccacaccactacaaaagtgacccagaaatcctgagccagtggaactcccaggggggtgcaggtatcactgggaccttgcccaccctactgtctcctttcatccctgtcccagagacctaacatcaccatggtctcctttccctcagtctttcataagtatttgtaaatactcttttaccaatatcattctttctctgttatttttcctttttaactgttgctcttttacttcagaaaaatttttcttttttcttttatgctcccctcatttccaacttcctgttccaaattaagcctaattatggttgagtgttaagattacggtttatgataaacctagaaagataaagtaatacatttttatgtgaaactatatctagtaaagaactggtaccaaccacctccaaagcccttgaaaatcccctttgttttatctgccagagaattcatctctttctctaattggtcctgcttttctctctagcacaagcagccaaattttaaaaaaatcttggaaggttacattataagcagtctaaccttttgatctgtaagcagataaacagagtctattcatagtggtaaaaaactgttatgaaaattatctgtttatagttatattttggcctcttttgctctcccctcagtcgtatgttatagtatgctgaagatacatggaattaatatacttccaaactggaccaaaaatgtcatataacagcctgtatttgcaggttaacaaagtatgagtgagaggggtatgtggctctgagtgctttgtttgcctgtttgtatttgtgtttctgtgttcctcctgcacaacttccctgacagcctgtgctttatgctttcatagggattttgaatcataagggaaagaagaaagattgcaaatcaagagataccagtaatcagatcaatgatgaaattttagtgtaaactatacattaaaatgacttcttctgtaaattttggtatccagaaccttatgctaaccctttcagatagaaaacagggcttgaagtatcacaaacatgcctttttcatttactgtttttttcattacttaggttattcctatttttttttgagacagagtcttgcgttgtcacccaggctggagagcagtggtgcaatcatggctcactgcagcctcgacctcccaggctcaagtgatcctcctgcctcaacctctcgggtagctaggaccacagacgtgtgccacctcacttggctaatttttttaaatttttagtagaggtagggtcttgctgtattgctcaggctggtctcatccctattaatgtgaattctggtaccagctttgactctggagatgctctggggcttcttgatggctgtggtcagcccacaccatggtcatgtgcttgccagcattctggtcattcctctcttatctgctgcctctaatctgttcctgtgtgcctggagactggtagccaaacctgccagaactgtatacagaccagaagtgcttctcctagtagtatgcaggtgtggagtttagggcacagtcattttgagcttctctggagctctcttccttttcccgctgatgacattatctcaggtagctgagtggccatagaactgagtcttagataaagtgtcactgcacaagcatgtggtcaggtgctgttcccctgccctggcacctgtggaaggtgtgtgggcctcctttctgttgctttcttgtaccacaccacaccccttctggcctcagggctcctgcatgggcttctctgtgcctggatgctcctctctcagcgtgttacagctgatcctccatgggttgactgcaaggcccagtttgcacaggatacttccagttaacacctgattgtggatcagtttactcctgttatttttactctcaaaaagtgccccaatttggaagataaaatatactgtctcctacttaaccatttcaggtctcagtccagtgtcacctcttcaggtagacctttccctttctctctcagggggcaagtctcctggtttgctgtgactgcagaataaaccccagggcttggttgggctgagccagggtttgccagcagacaaattcaggcttctttctatgtgagggcccatggcaggccagcgtgggaggacgtgagatgggaggggcagccaggtgctgggagggttgggagagacatggggaggaagagtgaggactgaagccagggggaagaaacatggaagtgtgctgtaagctctgtgcccactagcccttgatgagttttaatctgctttacccctcaaggctgtaagagtcagatctgagtgttttgaaaatgagacggtgtgtgcgattaacttgaagagaactgatacaggagagatctttggtgaggcctgattataagtggatgacaagcttcatttttcctaggtgataggttggactgttagacaaaactttggattcagagaaaaggcactctaggtgcattttgcctcctttctttaccttgatggattttcatgttggtcaaatgaagacttgggctacatctatgaaatcccttccaatttttagaagtatataattctgttgtacgctctagtgagtccagactataaagcattttgaattttactatttcttttcccctaattgtgggccagaaaggaaaatttccaaataaggatgcacagtccactctgggaaacacagggaaacaataactagaatacaagtctagcctttgccctggcatgaaaagaatgcagactgttagctgacctaaaggtttctgttttatttcacgtttaggtgaaatggtcagctttgaccattactcccaaagaagtttctctccagactttaagatatttgtgcaacattaagatggttttattatctgtgagacagctgtggtcacttttatttatcaaagtgccatgtttattgtatatgtatcaggagcagtgctggaaagctaaatttagagaaataaacctgggctcacaaatgattatggtgacattcagtatacccccaatgacactatcactataacattgctaggtcgcctcccagcagtctagccatctcaaccataaaggaatggcgaagtaatgatggcaacttgccttattggagagtgtgtagactgccgttttaaactgtaattgtcaggattagacctcaaccgtggtgaaatgttgggcataaaggtacatgaacaaagctaagtgcaaagttgtgtgaatgctgattcagtctttgtgaaagtacagtccacaggacacaaattggcaaaattcatttgccttacagtgtttaaagttttttgaattataacattttgggcctgagttctccacttgctgcagtttctgccagcccctttgttctttacttggctcttgcaaacatttatttacctatttagctctatagacagttgaagtttttggtgttttttttttttgtttttgtggagacggagttttgcttttgttgcccatgctggagtgcagtggtgtgatctcggctcactgcaatctccacctcccaggttcaagcgatcctcctgctcaacctcccaagtagctgggattacaggcatgtgccaccacatttggctaatttggtatttttagtagagacagggtttcaccacgttggtcaggctggttttgaactcctgacctcaattgatccacctgcctcagcctccaaaagtgctgtttacatgcctaagccactacacctggctggcagttgaagttttgacccctgtttaaaaaaagaaaagactattataatactggaatttaaattacaataaaggtgatttttaaataaaataaattttaaaaattaaattgatatactgtaaatatgcagttaggagataattgatcttcctggttacttcccagggaagcaggactcaagacccagatttgtgtgcagagtttatgggggttgcttctgggaacagtaccaatgagggggtgagggaagccggttgggcagagggagaagctaagatggatgcagctgcgatagctgcctcttcagtcccaggggattgagctggaatgggccttcaccgtgtcccaaatggagaccaggtggtcacatcagtctctcccccccatcagtcttggaggggagtctgcagagaatctgtttctttgccttttccagcagtcttgcccttcatttcctttatacatctcaaacactcaccgagtattttcttctttcaaaagtttattctcggggaggtggctccctggctgaccacaggtcccgccggcattcagcctggctgactcaggaggtcagcgcctagacctgactcattttcttccgctccttgccgacctcaccagggcctgcttcctggcacctcatttgaccaagccctctgccttggtcaaaatgaccaaggcaaaattttggtcaaaattttttgaaatgttagtttcaaaaaaaatcttaacctcctctttgcctgtggtgggtgggcaggccaggtcaggctcaccctgcagtgtggagggtggggtcagaggcccctggacagcctggggccgcctctgtgctccgcagctcagttttggcgggagagccctggccagttgtcaagaaagtgcgcctctgtttctggggtaatgctgtgggcccaggaccttcagcctgcagcccccagaggggatgtagtcatgccaaagctcctgatgccatcatcatcacgttagaacccctcaccaccacctccactcataagtcatttgccctaagccagcacagcacttcgaattcaggcagttgatcatcatctaagcgtgaataccattttattaatttttgcctagaaattggcactccctttaaaatcttttaatgcttttgtttactgcaagttttcttccattactttttcttctgtgtgtgccctctcctggctctctggctttcctgttatacttgtattggatcttttcagtcctctatgtctcttaaatttttaaaacttctattcatttcagtattcttagtcggtcttctcattcattgattggattttctgtagtgttcagtattgctagtgatcattattttgcaagtgacagcaatcttttctgatgtgacattttcccttttaacaaagatgtttttctttaaacatcttactgaaaattggttgactttctgaaggactattactacactggccttgctgggtatgtgggtacccatgactgttctgctcctggagattaagtactgggacttctgtagctcaggtccctagggggcctgggcctctgccgggtgggacagtgggctggatgcacatgtagggtaggctttagtgcagcattcctagtctgtgaacttctcctgtgtcatgccaagggatttgaatccaggtgtgaattcaactactcataaaagagaaccatactgacctatggcacattgagtagagagtattttttaaatgaattaggcctgatttaaactatattcagcccccttggcttatgtaaatgcgcaaatttctgcagattctctgcatagaagtttttttcttcatgctttctggagcgaaaattcttatcctggcttcctttatttactagctgtaggatcgcaggctagtttcttgcttgcttgctacattcccctcctgtgtaaaatggggctgttagtatttccttagggagttctttgaacaaagcccagaagttaataagttctcaatgaatgttaataaatgttaaataaattatcagaaaatgttagtttcaaaaaatcttaaccccttctctttttcttttgtcttctccgcctcgttttcctacttttcagtcattttacttgagggtaggcaacatttcatttctcaccaaatgcagacaggtgcttctccctacttccgtgtccctctccttctcccactacccttcttgccttctctaaggtattatttatgtagtcagggagtgtattggttcctgttgctgctataacaaataactacaaatttagtggattcaaaaacaatgcagaattatttcctggcagttctagaggttagaagtctaaagtcaaggtactggcagggctgtgttccttctggaggcttcaggggaatatcagtttccttgccttcccagcttctagaggccacaagcattcctcagcttgtggccccttcttccctcttcagagtatattgcttcaacctcttgggctgtcatcacatctcctttttccgtccctgattgtcttgcatccctgttgtaaaaccctggtgattatattgagcccagcagagaattcaggataatctctttatctcaatatccttaagcacatctgcaaaatccctttgttgtgtgacatactcacaggttctagggattaggatgtggacatatttgggggattgttattcagtgtgctgcaggaaggtagatgtgtaaaccttttatcatagcatagtgcaggtgggacttgcacagcggtaccctgagccaaaggtgtggacctcagacaaggaagcagttatttctgaggacattgggaaaagtttgatagaagagagatgtttgagctgagtcctaaaggatgaagaggccagggaagtttggaaggcttttaggctgaggaaacaacacttgctaagaaatagacttgtaaaaaaaatccagcaattttgaggaatagtgaaatctttgatgttgctaagacacagggtatattgaggagagtggtaggcaaagaaaattgtaggttaaaactagaatgtgctgtgataatgagcttctaatgtatcctgtaaagagaggggagccagtggagttgttttggtggcttttcaattataaatttttgtctgattgtgtaagtagttttcttcttctagaaaatgaagaaaccaaataaatagatcaagaaaataaaatcattcaaagccctgctactcagagataatgactgttgacatttctgtgtagtgtcattattgagccatttgtgtgtctgtttacccagttgaaacctcactgtatattaaatttcatatcttgaattctttagttaacggcatatcaacatttcttcatgtaattaaatactctcaactatccttaacatctccataatatcctattgtatatattaccataatttatttaatccttcattgttagattcaatatttttgtattttattttatttattattattttttgagacagagtctttctctgtcgcccaggctggagtgcagtggcgcgatctcggctcactgcaacctccgccttctgggtttaagcaattcttctgcctcagcctcccgagtagctgggcccacaggcatgtgccaccacgcccggctaatttttgtatttttactagagacggggtttcaccatgttggccagaatggtcttgaactcctgacctcgtgatccgcctgcctcggcctcccaaagtgctgggattaacaggcatgagccacctcacccagccatattttattttatttatttatttttgaggcagggtctgtcttgccctgtcacccaggctggggtgcagtggtacgatcactgctcactgcagccttgacttctcaggctcaagcaatcctcccacctcagcctccctagtagctgggactgcaggcatgagccaccactcccgactcctctctattttaaataatactaacacatagatctgtgtttaagtttttgaatgtttcctcagggcaggagtgcttctcctctgtttattctcttgagacgtgagatcaggtagaaatgttcccgtgtctaggtggaggagaccccagtgtgccctttcatttactcctgggctctagagtggaaacttctgtgtttttctctgtgtgatgatttgtgtgggtgccaagggccaaacccacatttagcaaagaaatagtgtgatccacttaaaagggggtttaataacttgagatggagatatcaagctgaacattcacaacaagcataactaaatcagagaggcagaagaaagcattaaccagaaaaataagtactaacttttaaagagtgattactcctgatttaaaacttttactagatgaaatacaaagggtaacagactgtgttgagaactgaattaattttctggaaggagtgtcttgtaaaacaaagatattgtgaggtgaaaaatgtaagatgcttaagggatctatgtaggagacctaataattgaatgataggattcttagaaggggacaaagtaacagatggaaaatacatcgtattataaaagaagaaacccatctgagctgaataaaatgttagacttcagattgaaaggactcatggaattcttttttaaaagacaattgctggactgcagcaataaagatagaaatcctgtcaacttctaggcaggaagataggtctgttttgagggaaattgggatgccataggaattcttacccacttcacaaagaagctagaatagagtctgtatggattattgactctaaggaactaatataaatcttctgtattcagacatatcagcctgggtttttacttgcatgccacagaagctgattttggttggctaataaatttttaaagatgttgagttgctgtgaaattgttagaagggctagagagagatgtctgcaggcactgcagccagggacagcgcatcaaatcttacacagaattggcccaggccggatgctgctgctgtgttcctgggcgtagacagtgtagcttgcaccagatgctgcaggcactaaagtctacagtgagtgccttggccactgctttctgggatcttgatcttgctgcagctaccattcttgcagtgagcattttccatcatagtccttgctttgcagcattagttcctgaatcaaagtctgggacaggtgtaaataatggcagggtcaagggggcctcctagctgcaagggggcactgagaaggcaggcagctggcatttttagcttatttaatgggaggtagaccctacctttaactgagactaataaggtgggaaagtccccaggcttaggaaagaagggttcaaaagctaggtagtcagaaagaatgtcagagatcaagtactcttgcccagatataattcagcgaaccagggcaaaagaagaatatttttagccatgagggattcatccatctcatttgaacaaatattcagatgtccaattggatgctggtaattggctcagaatagaaatatgaagatagaagaaaatgaataatataagtaacagtagagagcagtgaatgttgcagcaggaaacattgcatacataaatggaagatattaacacggctgaagattcagaatgtaagtgtaaagtaagaattcttggaaggatcgtactgccttggaacatctaggaaatagcgtggaactaaaaattctagaccatctcagcaaaatcctgaactaggattgcaggcattcagatataaaattcctctaaaaatttcatctttgttggtgtgggactggggggcatggttatttagtttggatgaaggtttaattaagagtgttagaaatggcaggtaactactaaccaagtagtaaaacatagtattcccaaaataacagggatcaaggatgatagtgagcacagaggtaagcaggccaggaaggaataaagagaagtaatatcaaattagcaaaagcgaggagaggaaaaagatgaaatgagttaacaaatagtaaacaaaatcaagtggaaacagtaaagccaaatgagcagccccacagtaaatactcatcagctaaactcacctattaaaaaacaaaggtccagaatattagtgtcagagcaagatgcaagaacaaaagcattgaacaggactaagaggtactatatattggtagaaaccaaaaatataaagtataactgcctttaagcagcaaaatgcatagaacaaacaccaggaacaaaagaatttggtaagaaacatattctactaagagatgctaattatgtgtcttttctaatttgacgggtcagctaagctaaattgccaacttggatgctcacaggggccggtgggtggcatgaatatgtgaattatatggtgagagaccagggatggtgggaattgcacagcgaactggataatgcatgtcttgcctaaaggcattgaaattcatacattttaaagcactttgccagccaaacaaaatatatttgtagcttgcttgcagcctgccagttttcaacctttgaaacaaaaaagcaaaagtatagaggttagaaacaacatatgcaacaaatgtattgcatatgttgcaaacatatttattgcgaaaatgtacagggaatgtacattttcccctaggtctagggagtatttacagaagttgatcatgtcatttatcacagaaaacaaaaagtgaaatatgaaaattttgatttttgtatgcaataacctgtcctgtcagtccagtgaaattagtggtaaaaaaaaagagatgattataacaacaacaacaaaaactaccttggagttaagagccactgttgtaaaataatctctgcaccaaaagaaaatctagacaaattataaatcatctagaaataaaagaaatagaagccttttgatatcaaaatttgtagaatagaactgaatctatagtcaggaaaaagtataatcttagatgcttttattagtataagaaaagaaagactgaaaatataagagcgaaatattcaacttatgaaactagaaaaaagtacaaaataaagagaaaggtaaaagctgaaatgaatgaaatagaaaataaaatggtagagaagataaataagaacaacactagttctttgaaaaggcaaataatggaaattattcttgattaaaggaaaaaggaaaaagtattagcaaagaagaatccattgttataggtatggaataaatgaaaaattaaatctgcagcaatatttgtgaaactctggaggaagtgggcaatttcccctcaaaatataaattcacaaattgttttctagaaaaaatataaaacctgaagtattattgctagtatttaacattgttttggtattgatgcaataaggcaaaaacattttttgttttaaatactgaaaaagaggaaaataaacttgacctaagaataagagaatttgtgattatatataagataaatataaaaacaaaataccttttttctatgccatcaataactggttagcattggaacgtgaaaaaaaaattcaattcacaaataccataaaatatctaggagtaatttaaactagaaaattataggacataaagtgaataaatattaaatcttactgtggttcataaaacaagacctgagataatggagaaactgcagtatgttccagggtgggtagatataatgttataaaattgtccttcccaagtagcctgcttaagagactaattctccccagaatttttcattaggaaaaaaggaagctccttacatttaagtcttagaaagtgtctttttaaacttggcatgttcttaataactttatttttgaataacgaagtaatacttcagacaaacctcaattttttctttttctttctttttcttttttttttggagacagggcctcactccactttcccaggctggagtgcagtggcatgaacttggttcactggagcctcatcctccagggcccaggtgattctctcacctcagcctcccaagtagctagaactacagttgcacaccaccatgtcccgctaaactttttgtatttttagtagagacaaggttttgccgtgttgctcaggctagcagcaaactcttggactcaagtaatccgccttcattggcctcccaaagtgctaggattacaggcatgacccaccacgcccaacctcttcaatttattttaaattgagttttatagaggccaccggacagaatcggtttaaaaaaagatagacaattttgttttatttagtacttattccattgggtatgatctcatagttacaagtattgttgaattgaggctttgaaagactatataacaatgcaataattggttaggttgtagagatcacaaatgtatacctacaggaagaatgtttttaaaaaaactgacctaatgtcatataagtacgtatttgtgacttagtataacattttcaatgacagcgtaatactatcattggattcagaaagtactgagtctcaagtagcttagaggatagaggaaaggggtgaagaaagagagaaccaaggtgatgcatgatacctgcactgcctgttaaagagagcttccagaaaatgcttcatccgcttggccagaacctagccatctggccacacccagctgcaaaagacgttggaagtgttctggaaccaccaagtgcccaacaaaaagttgagttaatgaggaagaaaagagaacaaataatggggtacaactagcctctacttggacataggtagtactctgggggaaaacattataaaatatgctgaaatattagtacgcttgtaaacaaataaaagtaaatgccaaaagaggtggcggtagaggtcagtaggtatagggtgatgagcaatcaagtggcaaaaaagaaaaacaaaggtgttcaacatcagtagtaatcagagaaatgcacatcaaaagaaatcacttttcgaccttcaaaaataataacttccagtggtggtaagtgtacagagaaacaattactcctatatgtctacccctgtggtgtgtgaatgattgcaatcttttttataaagcaatccggcaataattttgagattgaaaatatgtttctcttgaggaatccaggaattctgtcttgtagacataaaagcacaagtacatacttaacgttgcaaatgtaggaaaagtttgctaattgcagtactttttttgttctggcccgaatctaggaatactgaatgtccctcagtaggaattggttaaataaattatagtacagtcatcctcagtatccttgggagattcattccagaatctcctatggatactaacatccacagataactcaagtccctgatataaaatgctataaaatggcatagtatttgcatttaaactacgcacattctcccatatagtttaaatgatgtccagattacttatactacctaatacaatgtaaatgccgtgtcatttgttgttatactgtattgtttagggaataatgacaagaaaaacatgtctatatacattcagatgtacccatccctttttcccccaaatatgttctatctgtggttggtagaattctgggtggggaacccagaaatatggaaggccgactatatcattcttatgaaattttattaaataagaatgatgtcaaccgggcgtggtggctcacgcttataatcctagtactttgggaggccgaggcaggcggattgtctgagctcaggagttcgagaccagcctgggcaacacggcaaaaccccatctctacttaaaaaaaaaaaaagacaaaaaattagccaggtgtggtggcacgtgcctatcgtcccagctactcgggaggctgaggcatgagaatcgcttgaacccgggaaatggaggttgcagtgagctgagattgtgccactgcactccggcctgggtgacagagcaagactcctgtctcaaaaaaaaaaaaaaaaaaaaaagatgtagaggtaagaaatattattaaaaaggacaagtgagagctatttcctgaagctatgaccaggatgtattatcaggtgacaaatataactcacaagagagtgtttacacctttatgtcatagtgcctatgctgtgatcccaaacgaaaggctaagcatgtttgtgtcaacacagagagaatgtattcttggaagaatacattctttccaggctgttcataatgattatcccaggcaagtaggggattttgattattttgctcttagaaacagcatgtattgtttttatatgtgagggcttaggggagtttagtgattaaaagtatgaactttggagcccgcatttcctgagtttgaattccagctgaagctgtgtgatcttgggcaagttatctctactgtgcctcagtttcctccttggtaaaatatttgtagaaacaggacctactgtatatagtttcaaacaagtcagtatatgtaaagtatttggtaccgtagaagttctacatgagagttctatataagagagggccggctttattatttttaaacattttaagtattattattaaagtaagtcaagggtagaggaaaggtcattgtattctttccgtggtaaagtgctgaacatattttcatcagtcctagagcttgattttgaagaacatggtgatgcagcaaaatatttcttaattatgcctttgcctcgttttcagtggagtgaagaaacaggatcagctggcctgagaaagtgcgaagcacagagttttgtatttaacagcgagtgggctttatagctgtcttcactgtgtttttggaattggctgattgtccacagaattcacactggttcgatgtctaaacacttcagtgatgcaaaaatcagtttgggaaatagagacacttgaatgaatgggttttgagataaaaatctgtcttgtcatcctcctgaggtggagcagattgcattttccagctgaggctgtgactctcccttgtcccacatgccctcctacagtgtgactctgccacttcctctgttaagggatctacttcttgaatttgggcagccctagaaccgcttcagctggtagaagagggtggaagtgctcctctgactgctgaggctaaattataaaaggctgtgcaggcccctcttgtttgcgggggcacttgtgcttggagccgtgagccgttctgtaataagtccaaccactgtgaggctaccatgctggggagactaccacatggtgctccagcccacagtccgtggagctgtcatctcagccagggtttcggatggcaggagccacctcctagtgtctatgtaagaatggcctagccaagctcttcccaaattcctgaccggcaaaatgatcagaaaataaaacggttgtgttaagtgatgaggttatggggaaatttgctctgaaacagtggtggcaggaatgtaagggttagtaaacagcagcgactctgtgatgaaggaattcattcattcatgttggaaagacctttgcagagccaacctccactactccttgcacccagattgatggtcccatgaaccagaagcatttgtctagtgataatcacaggagtcttcaagtgtggtgtcctgttttgtatttttatttatttattttttttgaggcagagtctctctgtgttgcccaggctggagtgcaatggcacgatcttggctcactgcaacctctgcctcccaggttcaagctattcttctgcctcagcctcctgagtagctaggactacaggcgtgtgccaccacacccagctaattttggtatttttagtagaggcggggtttcaccatgttggtcaggctggtctcgaactcctgacctcaggtgatccaccctcctcggcctcccaaagtgctgggattgcaggcatgagccactgcacccagcttgtgttttgtattttttatttcacgttgcattttaactacagacacatcttggtgatgttgtgaattcagtttcagaccaccacaataaaatgaattacatgaggtttttggtttcctggtgcatacaaaaattatgtttacactatattgtagtctgttaagtgtgcaatagcattacatcttaaaaaaagcaatgtacatgccttaatttaaaaaatattgctaaaaaatgctaacgaagtaagcccattctgttggagaaatgacactgatagacttgctcgatgcagggttgccacaagccttcaatttgtaagaaatgtattatctgcaaagcacaaaaaagcaaagctcaataaagcaagtgcttgtattgtgtctcatgtatactaaaagtatgccaaatggtttacgtgatttttgtatgtatgtatctgcttatgagacagggtctcactcccatcgctcaggctgaagtgcagtggtacaatcacagcttactgcagccttgacttcccaggctcaggtgatcctcccacctcagcctctcctgagtagctagagctgcaggcagacaccaccacacctgggttttttttgtattttcagtagagatgggtgtctcactatgttgcccaggctggtttcaaactcctgggctcaagcagtgctcctgccttggcttcccaaagtgctgggattatagatcataggtgtgagccactgagcctggccaatttttgtttttaattgttgcctgatgtcccctgctgggtcctgaagtcttttgggttggtttgttttcaactggcacactacaccagttctatgtgctgtattaattatacaggtttgagtatcccttatctgaaatgcttgggaccagatgtgttttgaactttggattttttttttgtattttggaatacttgcattatacttagcaattgagcatccctaatctggaaatctgaaatactccaatgagtgtttccttttatggtcatgtcagcactcagaatgtttagggttttgtatttttttctgaattagggatgctcaacccgtaccagtatactacaccagggaactgactcggcattggtcagaccacattttgaacactttttggttgacttcccagcatttaaccccgtcttctcccaggaattctctttagctaattcccactttaaagtgagtcagcatatcaccctggtctcagtgagtcaaggatggcagagactcaatcagaatgagtgttgagtagatgttttttggggtgcctgggagagagtccccgctctttgctggatttgatggtgtgcagatgtgagccctggagctgccagtaccatcacatagccatgagggcaggcagcttattgatgaaggtgacctgtggaggaagggaggagcagaagatggagagaaattgaccctgagagaacatctttcagttgagccagacctgaagttggacttgatcctagactttcagttatgggagtcaaaacctctttttattgttgtaagcttgagttgggttttctcttgcaaccaagagatttttaactcacagaaacccacatctgcagtgtttctgagattctgggtaatatttcagagggaccttggtaaatcagaagctctctaggcagtttatccaatgaatggaccccgggacctatgaggcctggtgggaagaattaggaatgttttgagtgaagatttagaagaccaatggggaaacaaagctgcctgcagacattcagatgtcacgtggaagaggcaataaatttgttctttgtggttccagagtgtttcagaactggaatcggtgtgtgccatgttaatgaagatatagaattcagcctcatataaggaaggattgtccaactatttgagctgctcaacagtggaaggggctgtctagtggtgggtttccttttactgaaaatattcaatggtaactggaacatgagactttagtagatggcaacagaagttggatgctattgatgccactttgaatgaaaaattaggttatatgatttctgtttcttccagttctgaaataacgtgattttgtatttccttaggtatcaaaagacatccttttttttttttctttttttgggacagagtctcactttgtcacccaggctggagtgcagtggtgtgatctcggctcactgcagcctctgcctcctggattcaagtgattctcctgtctaagcctccggagtggctgggatacaggtgcgcaccaccacgcctggctaatttttgtatttttagtagagacggggtttcaccatgttggctaggctgatctcgaattcctgacctcaggtgatattcctgacctcaggtgatctgcctgccttggcctcccaaagtgctgagattacaggcgtgagccaccgtgcccggcttgtattagaagatatacttatgatgtgaccgttgggcaaattatgaagtctctcagactttgtttctttatctgtaaaataacaataataatacttttatgaactgagttttgtgtgcctcaagttaatgtatgtgaaagtgcttacaaaaccaaagtgctacacaaaggtaaagtgctgttatccttcctacatagtaaactccgattcaaaggatacggacgattccttaaatttctttgtgtgttttgacccatgggtgctttgaaaaaacaactcccacccccaaagtgatattaatagaaataaacaggattttgcgtgcccagtccatctaattatctaatttctccagttacaaattcaggtgaatttattatgttttcctggtagaacttggaagtttctcagtgatctctgtgaggtataactgaggtacacctgagccataactgtaggaagtcagggcctgattatgatctagactagactaggtggttctcacttgcatcgagcctccgtaacctggaggttagcttttcccatctgtcctgaaagtaaggctgcacgtgaatatggcagatcttttagttcactaaagcctgcaccctcagctcctccttattctcagtgtttggtgcctggagactgtgggctttattttcccacagtgctgctgggagatttctgttcagaggtgccaagctctctagttaggcaatgaggatttcatttggcctacacaatgggcaaggaagctaaggcgcagtatgcagagagaattctgggacgaagcgctcctccagccacttcagtttcaatggaaatttgatgtccctgcctgctttgcacttttcaaatggcctgtcaggagttgccctcccagagctgcttggcattctggcttctcctggagatgactaatggcagctggttgtgtgggccgcctgctagaagctagtcagaccataccattatctctcctcagaaacactgaggctttgtctgctgccctatctcccctgcatcctgacacagagcggtcactgtgtcctctccaggcctgagccccttcttagtgttagggggcttttgttcagaagctttattgtccccctctttctggagtgctgttcatagtggccgtggtacagcatgagtatttgggaaacaggaggagtagatttacaagcattttgaattctaatccaatttgctgagcaagtggagtgtgaggaaaattaattttgcattcttcccaaaaaaagtaaaatggagatgagatagaaaatgtttatccctttacaaaaatcatctttacacattgacactgctgtttgcttttaacaaaggaagtaaaatgggtgagtaatttggttcatttgcatgagtgtaggactcttttgtgtttttttccctccatttgatttgcaaagacaatttctattgacttttagtacaagttaggtatgaatctctagaaagcacaccactgagacgacccaaaagacagtccagctgtggaaaaaactacttttctgtcatagtcaaggtggggccccaagatttgataacagacttagttccttatggctgtgcatctgcttgctgaattgcctcaaacttctgttatctcatttgttctaagtccaaaggatcagtgctgcctataaagctgacggattgctaattgcctgtttccacactgtactcataaacattcatatttctttttcctaattttcattatcaaagtagtatatacaggggttaaaataatgaaccaggacaaggagcttattatgaaaagcaagactgctgctgccctgctgccctaccccttcccatttcttgtccctcttctcaaaggtaaacactttattatgcttttactgccttctaaaaaaataaacactcttttttaaagagcagttttaggcacagcaaaattgagtgaaaagtacaagttttcctatagtgtactcctgttcccaaacacactcagcctcctcattatcaacatcttccaatcagtgaacccacaccgatgtaacattgctcagagtccgtggtttacattgaggttcactcttggcattgtgcattctgtaggtttggataaatgtataatgccatgtatccaagttttttgtagagacagggccttgctgtcttgcccaggctggtctggaactcctggcctcaagcaattctcccaccttgcctccctcccttgggggtgggggatgaatgggcaggcacagtagctcacctgtgcctggctctacttattcattcctccctccccccaacccctggcaaccattgatctttttgctttagcaagcaaaaggaccatagttttacaaaactacggtctctgtagttttgtcttttgcagaatgtcatagttggaatcatactgtgtgtagctttttcagactgcttctttaacttagtaaatgcttcagttaaggttcctccatgtcttttcatggcttaatagttatttcattttaaggggtggatgatactaatagtccattatctgggtgtaccacagttggttgcttccaagttttggcagttatgagtaaagctgctgtaaagatccatgtgcaggtttttgtgtggacatatgtttttgactcatttggctaaataccaaggagtgctattgctggatcatagagaacaagtatgtttacttttctaggaaaccaccaaactgtcttccaacgtggctgaattattttgcgttcctaccagcaatgagtcccggttgctccacatcctcaccagtatttggtgttcttattgttttggattgtagccattctaatagttgtgtagtgatatctcacttttgtgttaatttgaaattgcctacggatgtatgatgtggagcagctttttttttttttttttttaattatactttaagttctggggtacatgtgcagaatgtgcaggtttgttacataggtatgcacataccatgatggtttgttgcacccatcatcaacctgtcatctacattaggtatttctcctaatgctatcccttccctagcccccccacccactgacaagccctggtgtgtgatgttcccctccctgtgtccatgtgttctcattgttcagctcctacttatgagaaagaacatgcgatgtttggttttctgtatataccccttaatgggattgctgggtcaaatggtatttctagttctagatccatgaggaattgccacactgtctgatgtagagcagcttttcatagctcattttccatctgtatttcttcttcggtgagttgtctattcaggtgtttttccatttttagtcaggtgtttcgttttccatttttttctttattgagacagtgtctcactctgttgtgcaggctggagtgcagtggtgcaattatgacttactgcagccttcacctcctgggctcaagtgatccttcttcttcagtctcctgagtagctgggactacaagtgtaagccaccatgcccagctaatttttgatttttttgatgagacgagtctcactatgcagggagaccccttgagacaggggtctcaaggctgcccagactggtcttgaacccctggacacaggtgatcctcccgccctggcctcccaaagtgtgctgtgctgggattacaggtgtgagccattacaccgagccctcattatcttactgttgagttttgagcattctttgtatattttggataacagtcctttatcggatatgtcttttgcacatattttctcccagcctgtggcttgtgttctcattcttttgatgttgctatttttttccccaattttgttgattcctcttatgatagatgaggatttaacacatggccctgcaaccctctcctagtgtcataatatcactgtttttagtttctttcttggttattgcttttagtaatgtatttcatctttatttcttgtcttgtcaactgtatatagtatctttgacaccctgtttgtaaggtgagggtggatattattgctgccatcctttttgcccactctctctgctttctcttctacctcccagtttctttcatctgtactttacctttttcactagcaaggatgacagtattcatatgttctagaaaatagtcttgcatgttctgtgtgtagtatggatattattgtgactacatatatattgtgccctgcagagtgaagttatgtgctgtgattttgttatctgtcttatacagcttatttttatgaagtttcttgttttgtgactatttttgttacaggaaagggggcccgatccagaccttaagagaggattcttggatctcgcacaagaatgaattcagggcaagtccacagtgcaaagtgaaagcaagtttagtaagaaagtaaaggaataaaagaatggctactccatagagcagccctgagggctgctggttgcccatttttatggttattttttaatgatatgctaaacaaggggtggattattcatgcctcccctttttagaccatatagggtaatttcctgaagttgctatgacatttgtaaactgtcatggcgctggcaggagtgtagtagtgaggacgaccagaggtcactcttgtggccatcttggttttggtaggatttagccagcttctttactgcagcctgttatatcagcaaggtctttatgacctgtatcttgtgccaacctgttatctcatcctgtgacttagaatgccttaactgggaatacagcccagtaggtttcagcctcattttacccagctcctattcaagatggagttgttctggttcacatgcctctgacatttcccccctcccttttataagagaacgcttaatcctaagggttgcggagggatgaagattcatcttctataactccttcaggctgaatagaggtgatgatattcctgcctgactattagggtctcttacattcagagtagagaggagcagagtcagaaagcatcagtatggtaaggtccattcataactcttgagtttcgacagagggtggtatctggaagatgaataagagtttaagaaaacattcagtaagcttgtcctgtattcctacacaaaaagtataacagcaatatattccacaagagtaaagcaaaataagtaaagttattccaagtaaactaaattagaagactttccatgaactgggcaactgttggaattaagctgatatagggttgttagctgattgtaatgtgcccagaattagaatactaatccagatttttacattatccatccctcttgtttcttctgagcagcagtcagagatcactggtaggttcacaggaataagcaggtgtagactaaattgcagaaacaaactgaaaaacagatgagactagaatttaataacaggtgtaccatagttcttgaaacatatttctctctccagttttccatttttacgaaagacaaattatggtaagactgatttgttttattatacttggcctgataatttgtataaagtgcagcaagaataattatttttcacataggctttttaattgactttaatggaactctgttttgtaagggatctcagataagactttttaaaagctgagccccatcatgggtttgtaccctcaaatacctatgagttgggtaaattcctttctttttgaggtcccaggataacttggggctcttcgacctgtgagaaagtgacattctttacttaccccaagtcagaaaccttgaacagggactgttgtagacaaggtgtgaggccagttccacacaggcttttattggctctataaatcaagtttaattccttaaaggaaaacacaccattccagtcaaaaccttggtaacataaccaatttctccaattgtgttctgttagaaaagagaacgaatttttttttttttttttttttttgagacagagtcttgctctgtcaccaggctggagtgcagtgacatgatcttggctcactgcaacctctgcctcccaggttcaagcgattcccctgcctcagccccctgagtagctgggactacaggtggcgccaccacgcctagctacttttttgtattttagtagagatggggtttcaccatgttggctaggatggtctcgatctcctgaccacgagacccacccgcctcggcctcccaaagtgctgggattacaggtgtgagccaccatgcccagccaagaaaacagattcttattgcacctttgcaaataactattttgctgtaagttaagaatactcacaactagttgccaaattctggagaaatcaggtagagagaaacaaatatgctcagaattttgtgcataggagtatataaactgttaagagctataatataaatagctcaaaaggaaagtttccttgactctgaaaaacaaaggatcagtagtgttttatgcaaagtttgaaatattacttccgttttttattggttcagtgaatttaggtaactcctgttttgcttgatattcatgaacatttcatctctccatgagagtcctgaaagtttttcctctattctgttgttacgctctccaaagttacaagaaaacatgcattgaagaacacctgttagagttctataattgattataaaccaccttctaaaggagattaaaacaagacagtcatctctggatgataaaaagctttaggacagccactattaaagccacatttgataaggaaattttgttacttctgtgatacacagaattttacataacaattataattattaataacacactaaataatattagaattataggagtttcccataactttagaatataccaataacacatttatgtaaatatagtccaaagaaagcaaaacaccatttcacattcgattatgcttcctgtatgatttttatatcaaataagccaaatgtcactgttgtattagtgcattatagatataaaacccaatttttttttttttttgagacggagtcttgctctgtcacccagtctggagtgtagtgacgctatcttggctcactgcaacctctgcctcccgggttcaaacagttctcctgcctcaacatcctgagtagctgagactacaggcaccagccaccacacccggctaatttttagtatttttagtagagatagagttttgccaattcttaataaaaccttataaataaataaatctttccaatcttaatcagtttgaccataaggtaagattctcataaactttttataaccctttacaagtttttgttaaagagcaggtcataagcaggtttttgctctaagaaaccaattttaatttatagaaaagctgaataatacccctttaatttagccaatgtccacacactggctattttaatttgctctaagaaaccaattttaatttatagaaaaactgaataatacccctttaatttagccaatgtccacacacagaatctcttttacaattaattttttacaaaccttccacaactgttcaaacctttagctttattctaacttaaagcaattctttaaccctttaggcaaaaaacccatattcccatgccttcttataatcttttaccaaaaatatattctactttccttacacaccttacaggtaaaactatttcttcaatagtctcaattacatgttacaatgttaacttttagcaacttttatttttggtgaaaaccctggttagtaagcaattttaattgtgtattaggtgtggagcctagccttaggacacgccaggcagaagtgcagataagggctgactctccagcatagctagggggcatggctaactccacatgtccccaggccttaccttacttaagcaggcaagttatacagtaagagtcatagtggcattttatgacgcatttaggaggcctaacaacctttgaattgtgcaacatttcttgcataaattttctttcaaaaatcctttcacgacttacacagaccatctgagacattcttggactttctgacttgccctaaacatccctccttttaaacaaccattttattttaggagaagaatttaccataccaagatcttttcttatataaaatctttctttataatcatctttgtatagctagggggcatggccaattccacatgtccccaggccttatctagaatctaatggctttaaggcaggtaaattgaacaatttttaaaagttaaacagtttatgaccttaaagcatttaacaaacttaatatctgacctgcataatttagactgaatgtttttattttatcagtaatttttaaagctgtttgtatttcccgaagattactaagattacatgaactaaaaggcattacagtttttgttttgctttcaaaatatttgatttaagcacttatttttgtttcagccaattagacttcttttatataaacattacacataatatgtatatagctacccagaaagaagaatattactacagtagttgtaagatttttcatttgccagtttttaagtttcttaattggattactggctttaaggtggagccgttggaagaacagggccaggaaagggggtccctggtgcctcctgtttttcccaaggagttcaggctgttagagcttgaatatctgcttttaattaaactgattttaaccatagcactctttaacaaagtctttttagaattttttatgccaaacagccaatatttctggcttttgaactttacctaaggtaacctccaaggtgcttagagaaaggaaaatttaagacagtccatggaggagaagagaatagacaaggtcacacagatattaaaccagaaacgacttcctagggaaggaatcaaacccgaactgctactgtgaaagtgcaaaaccctggcttctgagctacagcacgggacagtctctgtttcctttcctagaaggaatttagagtagttaattttgagcttgcaaaggcttttaactaatatgatttttagatctaactatgacatgaaccctaaaattcctgttccctggaaggcagagaccaaaagtactgccacatggttacaaggtcaagctcccaaggacataaacaaggtggagacttcatccacttttttgtttgtttcagggatctgtagccaagtttgttactgaccagctagcttgctggcttatcttgaaaagtgggcctgcaggtattctaagcccgtgttttatcctaaagcaccccttgacacggaaaaagaaattcatagcacaaaatacaccagcttaagactagccttagaatttttttttgcattaatcaaaacattacagaggagataaatactgatttttccccccattcattcaactgtttgcatagagagtgagaagctagaaatctgactggcaagaaattcttaccctttggccagcatgccaggcttctgggttccctttccctgagtggcactagtgatctggcttgcagcaccattgccctgggggccaagcctcatcataaaggaaaattacttttttttgttctggccagagcaaaatacatgtgataagacatagacattagccactctgcttaacacccaatatcaaactggtgaggcttaaatttgcccccaaatgggccccgtcatctttaatccagcctcagacttacgtggcctctgggcaaggtggttgccctgagtaacagaaaagataggaaaggaaaagtagagagagaaaagcattgcctgtagcagggtggggaaagcgaaatgatcagggaggtcagagaaagacccacccattgcagtgacattgaaaagttcaggtggctgctcctcagtagcaaagggatcttttccagccatcccatcagctcttaagtttccccttttagggaagaaaaagttccccatgtcccatagtcctgtacatacctgactctgtcacccacagccattagcaaagagtgcaaggcagattaatccaaagagaatagcagttaacatcccatagtgccaaacctgttcttacccaagaaggcctttactgagacgggcctctaaccccctaaatcttagaagggactctatccctcataagttggacctctaacccttgccttttattaagaggggcactttgtcctcttgaatcagagactaatttttcagacttgtttcatggatatcattttgagacttctcttgactggtttcctgtaatagagccactgctttctcttcctctttggtttcctcccttgtttttctggaacacatcctcaaataacttccttagaaagggtattaacagtttaattttctcagtttttgcatgctttaaaatgtattctacctctgtgattgatttatagttcatctgggtagagaaatctaggttgaaagtcattttccctccgaactttgaaggcttttgctttgttgccttctaggctacatatgtggtaatggaattgcaggatcttatggtagcttttttttttttttttttttttttgaaacagagtcttactctgttgcccaggctggagtgcagtagtctgatttcagctcactgcacccttcgtctcctgggttcaagcaattctcctgcctcagcctcccaagtagctggagttacaggcatgtgctgtggcgcccagctaatttttgtatttttagtagagacagggttttgccatgttggccaggctggtcttgaactcctgacctcaggtgatccacctgcctcggcctcccaaagtgctggaattacaggcgtgagccaccgtgctggtttttttttttttttttttttttttttttaaatagagacagggtctttctctggtcacccaggctggagtacagtggtgtaatctcagctcactgcagcctcaaactcctgggctcaagtgatcctcctacctcatccttccaagtggctgggaccacaggtgcatgcccccattcccaggctaatgtttaaatatttttgtgtagagatagggtctcactctgttgcccaggctgttcttgaactcctagtctctagtgatcctactgccttggccttattttaaactttttgaggaaactccatactgttctccataatggttgtactgattgacattctcaccaacagtgtacaggggttcctttttctccatatcctcaccaatacttgttatcttgtgtcttattttattttattttttgagacagagtctcgctctgttgcccaggctggcgtgcagtggcgtgatcttggctcactgcaacctccgcctcccggctttaagtgattctcttgcctcagcctcctgagtagctgggactacaggcgtttgtggcaccaccgcccggctaatttttgcatttttagtagagatggggtttcaccacgttggccaggatggtctcgatctcctgaccttgtgatccacccgccttgacctcccaaatgtagtacccattctaacagaagtgatatctcattgtggttttaatttgcatttccctgatgattagtgcatttttttcatatacagtttggctaactcctgttttctaatttattgcacagatgtaatcataaaagagaaacagtaacattactcacagaccaaccagcttaatactcagctgttctcaatatcatgtgttctgttatagtttgtgaatgcttattttatatgaattctatgaatgcttagtttgatgtactcgtgattgaccacagtataatttttcattggcatttaaaaaatgtcacacttcaaacatgtttcttctttatgattgtgttaatcttcataattatgagatggagcttgcttttatgttaacttcttggaatcagccagcctcaggaggatggtacacataagtgatgacggggtgggagcagcacaaaagatccaatggtgctggctgagccaatccctgttccactggcccttctctccactgtcccttatgtggtgctgtgtaaggaagcatggccagtctcaggacttcagagtgctttggttagcagtgaggtctgactcccactgcttcaaggaggtgtcgtaagctgtagggctgttgctctttacttttccctgtcagtacccacgaggaggtgtgtttgggctggaggcctgggctcacatggtgggtgcacaaccaagaccatcatcattggtctgatgatgaatttttagcaactctgaacctaacctgtgctctgtaacagtttctgaaatgaggtgtacagagatgggaagaatcttttggaaaacagagacagacatagtaaaaaaaaaaaaaaaggaaaaagaatagatataacaaaaatatggctggattgtacatttcataatacacatccattcataaatatactttagtttcatggttttttaaaaattcctagtagtatagataaggcagaagtaacacttatggggagaacagactgcaatttggcagcaaaaggaaggtgttaaactgtagctggaaataacagcagacttgatctgttctatattaatttttccagcttcaaaaccaacaaacaattgaaggtttaaaaaaaagaaagtggctgggcacggtggctcacgcctgtcatcctagcacttgggaggccaaggcggggagatcacctgaggtcaggagatcgagaccagcctggccaacatggtgaaaccccatctctactaaaaaaaaaaaaacaaaaaaacgaaatacagtaaattagccgagcatggtggctcgcgcctgtagttccagctattcgggatgctgaggcaggagaatcacttaaactttggaggcagaggttgcagtgagctgaggtcgcacattgcattccagcctgggcaacaagagcaaaactccatctcaaaaaaataaaaaaagaaagaaaaagtcagccttaatttagtgatgttattaagaataacaaatgccagtgtgatgatcagtcctggactctcaggtttgcctgttctgactagagttatggtgaaactttagttatcttccagtttttaatacggtccttgctgcaatgactttattctagagaactagcattactaaaacattttagtgcttagtggtttttaatacttatttcacaagaataattaaataagtcttttcctcgttgagtgtgtagtatgatgcaggttaggtatctgtgacacctataagtaaggctgacccatgaacaacactagcttgaactgtgtgggtccatttatatggagacttaaaaaaaataaatacattggaaaattatttggagagttgcaacagtttgaaaaaaattcagatgaactgggtagtctagaaatatgaaaacaattgagaaaaagttacatatgtcatgaatgcataaaatacatgtagatactaataatcagttttatcatttactaccataaaatatacacaaatctattataaaaagttaaaatttgtctaaacttatgcacacacagactgtacatggtgctattcatagttgagagaaatgtaaacaaatataaagatgcagtattataactgcatacaattaactgtagtacatacagtactcctgtaacaattctatagccacttcctgatgttgttgcagtgcgctcaagcattgggggtagctgcttggaaggtactgtgatgctaatcatctctgtgggagcagttcctctctccagtacacctcagatcgcagtaaaaagtgacctcttgagattcttgagtatgttttgttgtgtttagtgcagtaccacaaaccttgaataacactatgggacccatacaaagtgccactagtgatgctggcagtgctccctagaagccaataaaacccctgacagcattgaattgcttgctagattgaggaatggttgcctgtcgcttcagacagatgattcattttgcaaacagaccatgtaaacttatggtattgataaatacagtatggtactgcaaatgtatttcctcttccttatggttttctgaataacattttcttttttctatctcattttatcttaagaatacagtatataatacatataacacaaagtgtgtgttaactgtttatgttttcagtcaggcttccggtcaacaataggctattagtagttaagtttctggggagccaaaagttatacacagagttttgactgcatgaaaggttggcacccctaacctccaagttgttcaggggtcaactatattaaaagtctatgatatactcttggctttccagaaacttaatttgaagaagttaatttaaaaaccatagttttctatatattaatttgacagttcagcctttattaggtcaaagtttcaaaagagctcagctgttagatgtttagtaatgaatgccatcagcctttatgtcatcaggattcaggatgtttaggtgtgtgtttgctcagggctcagaaatagtcttggtggtgggtttacagctgcccatcttgttaggtgtggaacctgccttagcgctggggctgctgccagtctatgggaacattccctcccgtgcccttcctacactgtagaggcctacaggttgatgaccacttctgggacccttcattacacctctcactgaaagcatgtagagttgtgtaagtgacagcagccagccttgactcatcaaatagtctttcagtttgtaaaaaaaaaaaaaaaaaagtccaggattttattttacactgtaacatctgaggtgggtttcaattctagagcacaatggagactgatgtctgggtttcacccctagaattgtttttacattgtctgtgatatagtacagatgaaaataaaagagaattatttacaccttacatttgctgttacaagtattctgtattatgtctatatcatgtcaagtaacataggtatgttcttatttcatttattcttgtttctccatgtacacaaatgagtacatcatttccacttacggcaaaagtgatatgtcattgtatcagatccatctctcagtattatctgtatcttctgatttcttaatcaaatttatgctgtcaaaatatgttaatgatgttttttaaagtgtttattgagaaattcacaaagaacttgtattttgtcaaaaggccattgtttttgttgccaacattatcagtgcagatgtactaaattgcaagttacagaaaacccagctcaaggtgacttataggaagggtatttactggcttgcctaactgaaaggccagctataggccaaacttcagggttgatttgatttagcaacttaacaatgctattgagagtttagtttccttcttccttctctgccatctgcattcccaccttcctcttgaaagggcagggtggttgccagccattcccacacctacacattttctcactctggtcccgtggtgtttaatagcttgcccagaaaaccttccctttgtcacattgatcttaattgagttgtgtgcccatgcgtgaaccagcaactggctggggatggggtcatcctgagtagctcaggcttggagtcagcctcacccaaagtatagggctgtggggaggaagcacagaaaccacagtcagaactgggtaattagctagaggaggaggaaatggatgaagagcgacagccactgtccactgtgccatgtgatttacagtcatttgggttttgtttataagaatgcttgctttattttttcatttttttcttcttctgtctttaaggggcctttacaacaactaaacggacaggcattccagccccacgggaattttcagtaactgtctcaagagagaggtctgtgccacgtggtccctccaaccccaggaaatcagtgtccagtccaacttcttccaacactcccactcctacgaaacacctgaggaccccttccacaaagcccaagcaagagaatgaaggtggagaaaaggctgcgcttgagtcccaagttcgggaacttttggcagaagccaaagcaaaagatagtgaaattaacaggcttcgaagtgaactaaagaaatacaaagagaaaaggactctgaacgctgaggggactgatgctttgggcccaaatgtcgatggaacatcagtctccccaggtgacacggaacctatgataagagctcttgaggagaagaacaagaactttcagaaagagctttccgatctagaggaagaaaaccgggtcctgaaggagaaactgatctatcttgagcactccccaaattcagaaggggcagcaagtcacactggcgacagcagctgcccaacatccataactcaagagtcaagcttcggaagcccaactggaaatcagatgtccagtgacattgatgagtataaaaaaaacatacatggaaatgcattacggacatcaggctcctcaagtagcgatgttaccaaagcttctttgtcgccagatgcttccgactttgagcacattacagcagagacaccctcaaggcccctgtcctccaccagtaacccctttaagagttcaaagtgttctactgctgggagttccccaaacagcgtaagtgaattgtccctggcttccctcacagagaagatacaaaagatggaagaaaaccaccatagcactgcagaagaactacaggctactctacaagaattatcagaccagcaacaaatggtacaggaattgacagctgaaaatgagaagctggtggatgaaaagacgattttagagacatcctttcatcagcatcgagagagggcagagcagctaagtcaagaaaatgagaagctgatgaatcttttacaagagcgagtaaagaatgaagagcccaccactcaggaaggaaaaattattgaactggagcagaagtgcacaggtattcttgaacagggccgctttgaaagagagaagctactcaacattcagcagcagttgacctgtagcttgcggaaggttgaggaagaaaaccaaggagctttagaaatgattaaacgtctgaaggaagaaaatgaaaaactgaatgagtttctagaactggaacggcataataataacatgatggccaaaactttggaagagtgtagagttaccttggaagggctaaaaatggagaatggatctttgaagtctcatttgcagggtgagaagcagaaagccacagaggccagtgctgtggagcagacggcagagagctgcgaagttcaagaaatgttgaaagtagcccgagcagagaaagatctactggaactgtcttgcaatgagctcagacaagaattactaaaggcaaacggtgaaattaaacatgtttccagtctgctggccaaggtgagaagagacagctctttactggtatttgctcatccttgttcacatttctgcccttaacctctaaattcacagagcacagagaagcatttgcttagtctgtttcattcacgaagccagcattccagcttgaaggcctgttagattgcacacaggttgggattgggggatacaaaaaggaaacacccaaatttctgattatgggcggttcaaaatgtggggatgtagagtcaaatcagagtatgatgcagtgataaaagaatatcatacagcctatgcccaggctctagtctagtgcaaaggaggggcatctggtgtaacgtgggggttgggcgtagcacagaaggacttcctggaagaaatagcaactgagctgagttctgaagattgagtgggagtttgccagtctgtcagcatgcttttagctgccagtaacagaaaatgaaatcactcccaattttcaactaaaatattaccactattttggtgttttcttccagatatatgtgtgtgtatgtgtatcatacaagttacacaaatttataatcatcctgtacatgttattaactttttttgcatttgacattttagaaatattaaaacttttctcagcatattcctatcattaaatattcatttaaacattattttaaaggccagatactattttaatataaatatttcatatttaccctgttgttgaacatacatgtattgtcaaacatttgtggtctttccagtctttcaatattataaatacttttttatatctatcttactgtttatttaggaaaaattcctagacgatgacttaccgagtcaaagagtataaacattttaaagactttcaacacattcagccagattgcccttcagaaatattatgccagtttattcatcctagcggtcatgagatcatgagctttcctgagcctttgccagcacttggtattacattgttatatcatttaaatctgttaatcatttcatttttttaaccttttttgcttgggaagatcttccatagcccaagagcaaataacttttctcaacactttaatcagcctgtaattttgtttttgatgcaagaattgtggtgattttatgatattctgcccacctcccagagcagtgctggagaggtgcagagagatggcctcctatttcttgttccctccaagttctgggtctgatttagggatctactggcaagagagattcaaaacatcttcctaccttagtttaggggttgtcattgtttcaaggagcaaattatgccatgagctctcagggagatttttctccactgcttcgtctgtcttaagatgagtctgttgcagcctgattctgcaatttggccatctgatgagcttagtggtgggtcatgttaaggagtttctctctttgtctgtattctaaatttgtaggtattttattgaaagtacggaagtaattccattagaggttactagtcaggcttggcattgggttttaatatcttgtggagtaagattattctttttttactttaagattactcactactctctggcaaaatgttttatctcccatgtgcaccttcttgaagttctttatcagtccctctgtgtttttggtagtttggcattacattaaatgtgcatatcagtgagaaataatttgacatcttaaaaatagcttatttttttctgatcataaaatatttttattacagacgatttaaaaagtacagaaaagtataaaaaagaaaagtattacctttaatttcaccacttggagaaaaactgctaaccttttgctgtatgtcctttcaggccttttctcagtttatacatgtttgagcatgcataaaaacttgcattgatatgattatgatattttgtcttcctatccagaagagtagagtatgtctgtccacattccattacaaagaatcagttggattagtttatctattccactattaatctgtttctgattaacttgtttctacttttatctttattaatttttttgtcttattttttgtacattttggtttcttgactaaaattctttgttcatttaacttttttttatccttggttgataatgaaagcatttaaagttatagctttggtaaatagaggcaataaaatctggaatcttctggaataaactaaatgtaatttaaaggaaagtgtgcattttctgtagagtgcaaggcacaacatatatgtttaaaatcaaactgttattattcatgtatcctacatcttactgcatgctaactagaagtatcaaatactgatagtaagaagggaaaggtcctagctagtatttttaggtgagagtttgaggtaaagatgggggcatgctatcacatagggtttcttgtatatctatcaagaccctaggtttgtgattttgtgctgtcttatgtgcacagagactgatttgtaattgcagtggacttgtaacatactaatcttcctacccttttacattactgtagaaaaagcaaaacatagacctcctaaatggactaatactgattgtatctctaccacagactatcaagtaatctgccaacaaccatgaatttaaatgataatacttaagagactcatgtccaaaggataacaggagaagttttagcacaaaactatgatgaagggtctaacatgctggactgggtcctcttgacttacccagtgagcaatgatgtgaccttgggcaggcccctttacattgtgcaatgtcgaatagaagcgtgacggtggatggatcctggtctcgtatctaattccaagggaagcatttaacatttaattatgatgtatgttttttgtaggcatttggtacataccttttattatgttatgcaagtatttgctaagaggtgttttgtttggtggtttatttttagagacaggttctcgttttgtcacttaggctggagtgtagtggcgattatagctcactgcagccttgaactcctgggctcaagcaatcctcccacctcagcctttctgggtagctgggactgcagccaggcaccaccatgcctgactacttggcttgtttttaaaggatgaggattgaattttttctacagctaatgacgtgatctgatagtttttatgtaatcaagtttttttctcctctaacttgttagtgaggcaagttataacaacagattttctaaggtgctctagtgtaaaatcatgcttgcattcctggggtaaatcctaattcttcagttttcagtggtttcacttgactttttgctgagaacttccaaatatagctgccttcagcaggtatcggagtaactgtcctgttgagcaccaagcaacaacgtgtaccccatgagcagtgcattcatccactctaatgcttggcgaaaggtgaatattattaaaaaggatacaataagctatttacaaaaggggaaagtggtgccaaaccatcctatgatctaatagattccgtaaatctatgtaagtttcaagttaagattactcaagcaacccagataccgtcaaaagaacctataaaaagccttgaaaagtacttttttaaaaataggaggtaggtgtcttcctcaaacaataaatggaaaattggtaggatttctacactatcttgtaggctttttttcttctcatttctttttcttcattggtttgctgatttctttatttttttcaacttctctgatataccccatatgcatcttgatggccgcttaatctgtagtcacatgacatacttctgtacaactttgaggacgggtctgatttccacagaacccaaagccaccactcctatccttgccctagctagcaagcagcatggagttgtatgggattgttgtttttccagacaataacatgacccagctttaatttacttttttaccttttcagttgtttgggatcttggtttcaagttagaatatcttttctgggcttgaaacctagaagttttaaaagaaaattatctatttattcccgtgaggttgaagcttataggtggtatccttagaatcttagttctttctgcagaaacttcagtccgcttccagaagagtaaggagattataaataaccccttggcatgaatggtttgcgggagtcagcagaggtgaaatgactagtgttctgcttgtgtgggtcctagagccaaactgatttagagtggccagtggtcagagatggcagaaccagaatttgagggaaatatgtggcaaatagatgatcctgtagctgtgacattggaataggatgccttaaaggacttaagagatctggaaacctggtttaaacagtcaggtgggttggaagtgtatccaggtgatgtattgatatatgagaaactgccctcctgtcagcggcttgagccaggggacactccctccaccccggccccaagggtgggagattggctgtggctgcccatgatgcaggcccaggctgtggctggcagtgctgtggttctggacctcctgccaggggtacaggacagctcagcattgccaagcatcttggtccacctgttggcgacttggggcaggcatgtcacctggacatctgggtcctatggggagagggtttcccagagctttacctttacatctgattggtgagaactgcgtcacacagtgcccccaggccacctctcttgaaatcacagttgcagcctgattcttgaacaaaattgggattctgttaggaagaaacaaggtgggggtggcttttggtgggggatgggcacttgccccaccaggcctccactccctcaccttttcccacaaagtactcacagtgatctgatcatgtagcgccttccggtgctgcctggggcaccacatggcttcgcccagtgcccagctcccaccacacctccacttgcagtcccaccccacatccagccatattcccacccctccctccatgccaggcctggccgggccagtgactgtctggcagtcatgtttgctcagggggttttctcggcctgaagagaccccaccccattgaccattacctggtccctcctgaagctttccgcctcagttatggggtcttcagcgaggcattcagctctgcggggccctgtcccatggaacttcagactcatctcagtaaatgacattattgtcactcagccaaggtcactcatgggaatggcctgacccaccctggccctcagaggattcagatgtgcaggcaaaactctttggggccctgcagggaagctgagggaacctgctgcctgagtagccactggctgctgctggagaggtgggaaggttactgagctgaaaacatggagatttcagtcatcttcagctcacacataaggcatcccactggcaccaaatatcaactctggtgagcagaggcctgtggcttcatgctgggaaggaggcctgtcagcagctcctgtcaacagggcctgttttccagctcccctgggcaagccatgaggatgtggaagtcgaggaggcctgtggaggctgttggggagagccccacagctgttgcaccagtaagcctctgctcaaggggctgtggcctggggaaaattgccacaggcctcagcctggctgtgcagagccagtttagcattaggagcggaatcttctagagattaaactacaaagccagaatgcctgtgcagccttttattttgtgggatgtgataggcatgtggcccggaactcatggcatgtctgccaggtcctctcccgacacccccaggtctctgttcttgaagccccttgaaaaggggcagaagtttggtggagacagtcagatagtttgaggaagggtggtcttgccagttgggcagatccacagaacctgtggctccgaccccttgctcttacctgtgactccacagggggctgcttcccaatcctgcctgaccctgcttccctgcgatggacttgttttctcctggacacgttaatgccttttgtgaggtgaggcctaagcagtctcttcctttcacatgacctcaggactcatctgcgaacctggtgttgcccagcacttctctctccagtccgagttcttgggaagtacctgcgtggggccttgttgcttcgaaaggtccctaccagggtacagccactgcttctgaagcttgcctctgagttcctaaaggtgaaatacagatgtttaccctcatctttgagttttctaacagcctttctccactatacctgaagtgtaaataaactaacatttcctcctctcccttggtggagcagcattggccaaaataataataattcaactttaggccaataagaatgaactatggatgattatcagcagtgtctattcacaacagggctaagaaccgagcagagggagttttgcagtacccaagctagatgccagaacagaaacaccccactttcttactcattgaattagcccgttttcatgctgctgataaagacatacctgagactggaaagaaaaaaaggattaatgaacttaacagttccacttggctggggatgcctcacaatcatggtggaaggtgaaaggcacatctcacatggtggcagacaaaataagagagcttgtgcagggaaactcccccttatataatcatcagatctcgtgagacttatactgtcaggagaacagcacaggaaagacctgcctccctgattcaattacctcccactggggtccctcccacaacatgtgggaatacaagatgagatttaggtggggaggcagccagtctgtatcactcatggtaaatttactcaagctgtcattccaagtttatttccttttaaactatatgtaattttagcattgcaattccttccatctattaggtgttcagtaaatacttttcagacgaatgaatgaatgtcagagaaacttgcagcagaattgaggggctgctataattatattaatatgtttaaaaagtaaagtttattatattttaataacagcaactaatattttgggctatttgtatgtgctaagcagtctcagagcttttccatcatttaatcttatttatcttaattttatgctgttgattctgttgtctagtattttttcatttgagcaaacagaatgatttaagttattagtctaatggattgatgaaatgaagccagcattcaaagttgggtctgaccttagagctcttattcttttttttcttttctttttttttgagacatggtcttgctctgttgcccaggctggagtacagtggtgcgatcatagctctctgcagtctcaaattcctgggctccagtgatcctcccacctcagcttcccaagtagctggaattacaggtgtgcaacactatgcccaattttttatttttattttcatagagacaggatcttgctctgttgacaaggctgatctcaaacttatgatgatcctcccacacctcagtgcctcccaaagtgctgggattgcaggggtgagccaacgtacccagagctcttattataatcactgatttagactgctgcccagttacctgaaagcaaagaagagacagaaaaacacttaaagcagacctaagactaatagttgtcactgtcatcttaaggccaaagccctttgaagaaaaccacctttgaaagccttgttgaactaggagagttttacctgattgtaatacaatggagaaattcacagtgaaaacctgagtcatcaagaaatgttattttgtttgacctctacctgagtcttgaggggagagggggtgagttgacccctgagtgtatggggtggggactctgggaatgctgccagaagagaacagcaggtcctaaggccagaaagcctggccaccaaggaagtgatgcaggtagtttgtccttgttggagtgaacagggtggtcagtggaagtggcctggtggagacaccagccaagcagttaggattttatcctcaagacagtgggagtctctgaagaatttttttttttaaatagcagcttttattgagatatgatccatttaaatcacgtaagtctgtgggttttagtgtattcacacaattgtgcaaccatcactacaatcaattttagaacatttttatcaccccgtaaaaaaatcttaacccacagcagtcaccctccaagaccgcctccctcccagcccctggcaaccacaaatctatgttttggctctgtggacttgggtcttctggatgttttatacacatggaacccacgccctgcggcctcaagcagccctcccactttagcctcccagagtgctgaagagttctttctattctttggatacaaatcctttaccagataaatgatttgcaaatatttcctctcattctgtgggttatcttttcattgtcttgataatgccctttatggcacaaaattgtttaatttttatttttatgaagtcgaatttagttatttttctttggtggtttgtgcttttggtcggaggaattttaagagttatggaatcacatttactgttgagaaagatgacttgggccacagttaggtgagaaagaatgaaggacagaacagggagtgagttgggtgggaagatgagggctggaaagacattcattttatttacttatttatttttgagacggagtcttgctctgttatccaggctgagtgcagtggtgcatctcttcacgcactgcagcctccacctcctgggttcaagcgattctcctgcctcagcctcctgagtagctgggattacaggcacctgccaccacgcccagctaactttcctatttttagtagagacggggtttcaccatgttggccaggctggtctcaaacccctgaccttaagtgatccacccacctcaacctcccaaagtgctgggattacaggcgtgagccactgcacccggcctggaaagacatttagatgttagatgtgtagaagggaggctcagtagggtcaggtgactgatttgatgtcagggacgggcaggaggaaggcatttcagcctattcatagatctccagcttgtaggattgaatgtgcggttgtgctgcttcctgggagaggaaacacagaatgtggggcaggcttgagaagggagcgttatctgctggagctaacaaggatacccaggcctgcaagcccaggctgctgtcagcaactgccgatgcagccacagaggagatccgggagcctctgcccttccaggccaagagtcctccaaggccggggcctcgtgcctgaggtctctctttgcccctccagtacctttagaagctgtagaaatatgtctagacaggatgttccatgaatgcatttcacatatgctgaggtttgtgaggagcctccacagtgtcagaggaggttgcgactctgaagatgagcaggtgcgattctgaattcttgaccattctctgccctggtagatgatctctttttaagcactcgagaaaacttgattgaatggactatataatcactatataataaacagattaagtcaaaagccaagtaaaatgacagacttacacaagaggcagttatggggggtttatgagtcaggtatctttcttctccacttgttctgttttctaataaaactgtctgtacaactttaatgttactggaatttactcagaacttattatagtgatctcattctgtccatgtctctatagtaccatgtttttggcatgtaactatttgaatgaaagattaaatgatttctcatagccagggcataattcttcaagatactgtctttgctataaaaatttacaaaaaataactaacactgaaatgtttgagccgcattttgtctcacagaatgcttttacttgaatgtactgttttctttgttctttatatattgataatgttgggtaatctataaacctaattccttattctctttagtctacagtctctattcttatggctgctttgtgtaggagaagagcttggttcttagatatctctagcttgatttcctttctgcttttgttcatcacactaaagaaagctatatagatgccctgacagagatcttttttcagtattgtcaaattatctggtatcaaaaaacagaaacccttaagtaacttcacagcttctcacaagggcttgctgcataataacaggcagatatttttatattcactttacagattaacatatgaagagagggagaaattaaatcacttgaaaagaacaatccagcatgtatcaagtggctgagaccaaaccctacccttggtcaaaccatcacaaacagttgtttacccctccgagagaggagaatctagatgtgtgtgttgccaccagcataggagtgctcttaatatctgcagtcggggagagcatcccccccacccccaagcacttcctctttgcaggagcactcatctggagatgcccgaggcccattgcctttccttagggtgctggttaatgtctaatctaattctttgatccaagcttgtgaagtgacagtgattcttttggggagaggatggcaagtagcatgactcagcctccaggcttaactttatcttccgagtaaggagtttgggggtcctgagactttattttcctttacatgtgtctgacaagcatggtgtgggggtggggtgggtggaggaggtgacccttgataggattctagaggggtctgacttcagagctgcctgcttatcctctgggccctgcgtaggaacctctgctgccatatgccttgggcacctgatggaaaggagtggctttctctgtcctctctgcaggaacccttcttgggaagtttgtttgactctatttatagtgcaattccactggctccatatctacagaaagttgatctttgaaattgagagatgcatgagagtgattccttttttcaagggaaacgttgaaaatcacattgctgggtgtctaagagtgtgattcttgacctagagaagttaaactctaaggagctggccagtcagacatgttgggtggtctccctgtagttccagcttcagagggctgaggcaggaggatcacttgagccccggagttcagcctaagcaacatagcgagaccccatgtcttaaaaaaaagaaaaaaaaatctcaagggaaatgcaaaggagctggccagcagagagaccagcaatgtgaatagggcctggatcccctgcagtcgtggaagggtaggctttggtctcagccacttgatacatgctggattactcttttcaagtgatttaatttctccctctcttcatatgttattctgtaaaatgaatataaaaatatctgcctgttattatgtagcaagcccttgtgagaagttgtgaaatgacttaagggtttcagtttttttattgtgtgtgtgtgtgtgtgttttttttttcttgtaaatagctttctggaatatattgttaaacttgagatagttattccaacatccaagaaggatgtagtgatgtgtgcatgtgaaacaactgctgatttgcaggtcccctcccccatgccgagttacctagcttgtaacttggcgcagagcctttgagggacagcagcctcacctgcaagcagaggctttgctcagggtgctcgacctctaggctgcctcgttacatcctcagtttaattcctggcccacagttgtcccagccaaaccacatgcatgtttctagactccaggtgacaggcccttagcctgaggactctacaacatgcagccaggtagttatgcagaaggccacagtctgccccaggatgcaagactcaaaagccaccttctattgctgcttttcaaatgatttcagacatcagccttccaggatctaaaatgcattacttcttttctccttaaattcatcttctggccaggcacagcagctcatgcctgtaatcccagcacttgggaggccaagatgggaggatcacttaagcccgggagcctgggcaacatagcaagaccccacctataaaaaaaaaatgaactgggcattgtgatgcacacctatagtcctggctctgagggaggccgaagtggggagaatggcttgagccaggagatagaggctgcaatgacccgtgatcgtgccactgtgctccagcctgggcaacagagcaagaccttgtcccttgactccaaaaaaactaaaaaatagtaaagtcagcttctgtttaataaagtagctattgctaagtatatattggtctttcatgtattgtgatttttcttggtcaaactgacctgtattatattactacctagtgttgtatatataatacatagggcaattgtgagagaaagaatgactttcattgacttttactgttacatgttccaggcactatgataaactctccaagtcattatttcacttaactgcccaccccccaaccctgcattgttagattatgaaacagaggcagagggattaaggaatacaaggcttgattcactagaattggggtttaaaccctggcggtctggctccagaatatatgtccttagtcatcttgatgcatttaagcagctttcaagcttcagagcacaacctgcaatgatctattttgtattacaatccagagtctcacgcctttataattaaaacacaagcttcacagagcagtgctgacccctgagcacaggcagggctctctggctgtttcccaggctgtttctctctctcttctcctgtcctttccctccgtcccttcctcccccctcccttattctttttttctaatttttaattgttatgggtacatagtaggtatatatatttatggggtacctgagatattttgacacaggtatgcaatgctgtagtcaccctgttgtgctgtcaaataataggttttattaactatattgtatccattaaccatccctgtttccacccctgccccaccacccttcccagcctctggtaatcattctactctctatcttcatgagttcaattgttttaatttttaactcccacaaatgagtgagaatatatgaatttatctttctatgtctggcttatttcacttaacataatgatttccagttccatccatgttgttgcaaatagcaggatctcattcttttttatggctgaatactctgttgtgtatatggactatattttctttatccatttgtctgttgatggatacttaggttgattccaagtcttggctattgtaaatagtgctgcaataaacttggtgagtgcagatatctctttgatagactaatttcctttcttttgggtgtatacccagcagtgtgattgctggatcatatggtagttctatttttagtttttttgagggacttctgtactgttttccatagtggctgtactaatttactttcccgccaacagtgtacaagggtctgcttttctctgcatcttccccagcatttgtcattcatgacttttgaataaaagtcatgacttttggataaaagccattttaattggggtgagatggtatctcattgtagttttgacttgcatttgcatttctctgatgatcagtgacattcagtatgttttcatgtttctgtttgccatttgtatgtctttaaagaatgtctagtaagatcttttgcccactgtttaatcagactactagatttttttcccccattgaattgtttaagctccttatatattctggttattaattccttatcggatgggtagtttgcaagtattttctcccattctgtgggctgtctcttcactttgttgattgtttcctttgctgtgcagaagctttttaacttgatgtgatctcataggttcatttttgttttggtattctgtgcttttgggctattactcaagaaatcattgcccagatcaatgtcctggagagtttccccaatgttgttggttttttagtagttttcatagtttgaggtcttagatgtaagtctttaatccttttgatatgatttttgtatatggggggggtgtctagtttcattcttctgctcatggatatccagttttcctagcaccatttactgaagagactgtcttttcctcaatatatgttcttggcacctttgtcgaaaatgagttcatgtagatgtatggatttattcctggattctctattctatttcattattctatgtgtctgtttttatgccagtaccatgctgtttgggttactatggctctgtagtataatttgaagtcagataatgtgattcttccagttttgttctttttgctcaggatggctttggctattctgggtcttttgtggttccatatgacttttaggatttaaaaaaaattataaagaatgtcattggtattttgatagggattgctttgactgtttagattgctttgggtagtgtggacattttaacatattgacttatccagtctctacacatagagtgtctttatttttgtgtgtgtgttttcttccatttctggtgtcaatattttatagttttcattgtagagatctttcacttctttgattaagtttattcctactttattctactcacagctactataaatgggattactttcttgattcctttttcagattgttcactgttggcatataaaaatgctactgatttttgcatgttgattttgtatcctgcaacttcactgaatttatcagttcttaatagttttttttttttttttttttgtggaggctagttttttccagatatcaagtcatatcatctgcaaaccaggataatttgacttcttcctttccaatttggatgccctttatttctttcccttgtctgattgctttagctgggacttccagtactgtgtgtgaataacagtggtgacagtgggcatccttatcctgttccagatcttagaggaaaagctttcagtttttctccattcatatgatactaggtgtgggtctgttgtatatggcttttattatgttgagatatgttccttctgtacccagtttattgacagtttttatcatgaagggatgttgcattttctcaaatgttttttcagcatcagttgaaatgaccatatggtttttacctttcatttggttgataccacattgcatatgtcaaaccacctttgcatccctaggataaatcccacttggtcatgatgaataatcttttaaatattttgttgaatttggtttgctaggattttgttgaggatttttgcatcaatgttcaccagggatattggcctatagttttctttttttcatgtatctttctttgtctggttttgttatcaggataatactgctttcagaattggtttggaaacattcccttctcttctatttcttggaatagtttgaataggattggtatttttctttaaatgtttggtaaatttcagcagtgaaaccattgggtcctgggcatttctttgctgggggactttttattctggcttttatctcgttacttgttaccggtctgttcaggttttggatttcttcatgattcaatcttgttaggttgtatgtgtctaggaatttatccatttcttctaggttttccaatttattggcatatagttgctcatagtagtctctaatgatcctttgaatttcggtagtattggttgcaatatctccttttttatctttgattttatttaattgggtcttctctttttcatagtctggccaaagttttgtcaattttgtttatcttttcaaaaaccaactttttgtttgttgatcttttgtatttttttcattaaaatttcatttatttctgctttgatctttattgtttcttctcattttgggtttcatttgctcttgcttttctggttatttaagatgcattgtttgtttatttgaagtttttctctgtttttgatgtaggcgctgattgctgtaagatttcctcttagtactgcttttgctgtatctcataagctttggtatgttgtgtttccattttcatttgttttaagacattttaattttttcttcttaattccttcattgacccactggtcattcaggagtgtattacttaatttccatgtattcgtataatttccaaagttcctctttgtgatttctagttttattccatggtggtcagagaagatacctgatatgatttcagtttttttttttttttttaagttttaggagttacagggccaggcgtggtggttcaagcctgtaatcccagcgctttgggaggccgaggcgggcacatcacctgaggtcaggagtttgagaccagcctggccaacatggagaaaccctgtctctactaaaaatacaaaattagctgggtgtggtggcatgcacctgtagtcccagctacttgggagactgagacaggaaaattgcttgaacccaggaggcggaggttgcaagtgaagcgagatcgcaccaccacactccagcctgggagacagagcgagattgtgtctcgaaaaaaaaaagtttcaggaattattttgtggcctaacatgtggtctctccttgagaagaatcatgtgctgaggaaaagagtgtgtattctgcagccattagatgaaatgttctgtaaaggtctgttagttccatttgttttgttttatagtgcagattaagtctgatatttctttgttgattttctgtcttattaactttttgttgttgtctgttgtttctatttacagcttattataccatgtcttgaaaagttgtagttatttctcttgatagattcatcttttagtctttctgtttaagatacgagtagttgacacatcacaattagtgttaaaatattctgtatttgtctgtgtacttgctgttaccaatgagttttgtatgttcagatgatttctttttgtttgttaatgtccttttctttcagatcaaagaactcccatttgcatttcttgtctgctgttgatgaaatttcttaggttttgtttgtctgggaaagtctctatttctctgtcatgtttgacattttttccttcagtactttaaatatggcatgcctctctctccctggcctgtaaggtttccactgagaagtctgctcctttgtttcttttttcttgctgcttctaggatcttttcattatctttgccttttgggaatttgtttattaaaatgtcttacttgggcaaagtctgcttggtgttctataacctattgtacttgagtattaatatttttctctagatttgggaagttctctgttgttatccctttgaataaactttctaccccaatctctctctctacctcctctttaaagccaataacttactagatttgcgctttttttagactgttttgtagatcttgtatgtgtgctttattttttttaaattttgtctcctctgtatattttcaattagcctgtcttcaagctcactaatttttcttctgtttggtcagttctgctgttgagactctgatgcattcttcagtatgtcataaacttttagctccataatttctgctttatttttaaaaaattatttcaatctcggccgggtgcggtggctcatgcctgtaatcccagcactttgggaggccggagtgggcagatcacgaggtcaggagtttgagaccagcctgaccaacatggtgaaacccgtctctactaaaaatacaaaaattagccgggcgtggtagcgcctgcctgtaatcccagctactcaggaggctgaggcaggagaatcgcttgaacctgggaggcagaggttgcagtgagccgagaaagtaccactgcactccagcctgggcgacagagcaagactttgtctcaaaaaaaaaaaaaaattatttcaatctctttattaaatatatcgaaaggattctaaattctttcgctgtgttatcttgaatttcattgagcttcctcaaaacagctattttgaattttctgtctgaaagatcacatctctgtcactctgggattggtcactggtgtcttatttacttcatttgatgaggtcatgttttactggatggtcttgatgcttgtggatgttcatagatgtctgggcatggaagagtccggtatttattcagtcttcacagtctgggcttgtttgtacttgtctttcttgagaagactttccagatattcaaagggaattgagtgttaggatctaagcctttggtcactgcagctgtgtccgcattagggggcaccacaagcccagtaatgctgtgattcttgcagactcattgaggtatcaccttggtgatcctagataagatctaggagaatttcccggtttatgaggcagagtctcttgttccttttccttactttcccctaaacacacagagtctctctcttcatgctgagctgcctggagttggagcaggggtgatgcacttctgtggctaccactactgggactgtgctgggtcagacctgaagccagcccagcactgggtctcagtcaaaacttgtggtgactattgcctggctactgctgatgtttattcaaggcccaagggccgtttaattagcagatggggaatctagccaggcttgtatctttcccttcagggtgatgggttcccttctagcccagagtgggtctagaaatgctacttgggagctggggcctggagtcagcagctttagcagtctgcttggttctttattttattgtggctgagctggtatccaagttggaagacaaagccctttacccttccctctccttttctcaagccaaagggatctctgccagtggccaccgccaccccaagcctgtggcagcaccactgatgtttattcagggcccaagttctctttagtcagcaggtctggatctctcccttcaggtccacggtgggtctagaaatgctgtccaggaactaaggcctagatgggggactttaggagcctgcttggtgctttattttactgtggctgagctgtgcccaagttgcaagatgaagtcccctttactcttccctctgctttcctcaagcagaagggatctctccctgtggccaccacagctgggaatgcactgggtcacacctgaagccggtacagtgtgtggcccatgatgagtactgtgtgggtaccactgatgtttaatcaaagcccaaggactctttggtcagcaggtgatgaatgctgccaggactgggtccttcctttcatgacagtgggtttccttctggtccaggctatgtctagaaatgttatctgggagctaggacccggaatgggggcttcaggaatctgcttagtgctttattttactgtggctgagctggtatccaagttgcaagacaaagtcctctttactcttccctctccgcccagagctgtgagctgtgctgcctggggttgggggaagagtggtgcaagcactcccttggctgctccaggtggtgtctcactgggtcatgtgcactccaagtccactgtctgagcccagcacagcaccaggacttgcccagaaattgcagcccttgtggcctagcctctttcagatttacttaggactccaaagtgctttagcccacagaggtagggcttgccagaactcagattctcactggaatggaagattcccctctggctagggctggtctaaatgctccttttatgggtgctggctgaattctgtcctgtgttgctttctgctgtgatgggacagcaccaaattccaatgcaatctcacaatcattgtgctttccctcccccggggtgcacagatgctgtctctctaccatgtggttgctgccaagggatgagggagaggggatgttggagagtcaagacggtctttcctcccctctccggtgcatctttccttgatatgatgtgttaaaaccaggcactgtgatcgttcatctgatttttggttcttatgaagatgctttcttacgtggatagcagttccatttggtgttcctgcagggaagccattgctggaggatcctttttggccatgttgttctgtctccaggtctctcctcctttccttatcctttgtcacaatttcccagtgaatgatcctgcagtgctgcctcccagtgttcattcaatcattcatcaaatattcattaaatgcctcctgtgtgtgatgctgtgtagatactaggggtgcaatggtgaattaaacagacaaggtccctattcccatagagcttatagccagaaggttttgcacatgaaatgtaattggaaaaaaatttcatttcatacaaagaaaccccacccccagcgccagattacctggtaaatatacagctatttagtaatgttaattaaaggactgtagaaaagggacaatgatgtttattgcagcatttttgtaataataaaataatatagtcaaacagtggaatactatgcaccaattaaagtaatgacttagcatgatgtgtatcagtgtggatacatttcaaaaacacagttaaaatgcaggagcatagtaagcatagtattgtagaggacaaagcatattaccatgttataaatgcagaataatacagatacagtataatccactgcaaaagcacaatatagtgtagcattgtgtaaaaggacaatactatgtattgtcatggacacatgcatatatagtaaaagtgaaaaaccattcaaggattgaccacataccaattttaggataatgcttattactctctgaggtaggagggaagattgaggttttaaaaaattcttattaaagtaaaaagattttgcaaatgtgacaacatttaaccattgttaagtctgtttggtgcatgattattatttttggtgcttttctgtgtatttaaaatgtttaacaattaaaaaattgaacagatgaagcgattgtgccgtgccacttttctgcttctgtgtatgtacgtttttgtgtgccttccgccgacattctctatcacatttttgctgtgatagagcatgaatgtgatagagaatctttagagtttcctctaaagaagcattgcagccccaagtatcttatctctaagggaacctgggggtgtgcagattagcctggcttcagggttgttgttcacagctcagcagcagagggcgctgctccatagcagatgtgcggtgggggtggccacaccaggcagctctcttggtgcagggccagtgcctcccagggaagcactgctctcccagggaagcactgctctccccagctgtgggaaagaggaatatttaagtacgtgcagattccctcctgcttgtaggagggggcacagaatccagccatttggaagcatacatcgtgtttctctgactattcacagccttggctgtttctgaggctaagaatgcaagaaacagcacatgccaagggcgtctttgctactatgtccgtgagcctgctgctgacttgtggggagcttttcgtaatgttttattttagattgaagaggttcatgttcaggtttgttacatgggtatattgcatcatggtggggcttggccttctagtgtacagatcactgtgggaatttttttgttgttaactgaccaaggaaccttccttttattttaggtggaaaaggattattcatacctgaaggagatatgtgatcaccaagccgaacagctgagcagaaccagcctaaagctgcaagaaaaagcatcagagagtgatgcagagatcaaagacatgaaagaaaccatatttgaattggaagatcaggtggaacagcaccgggctgtcaagttacacaataatcaactcatcagtgagctagaaagtaagtggggtctgccaggcatggtggctcacacctataatcccagcactttgggaggctgaggcaggaggatcacctgaggtcagaagttcgagacccagcctgaccaacatggtgaaaccctgtctctactaaaaatacaaaattagccgggcgtggtggtgggcgcctgtaatcccagctactcaggaggctgaggcaggagaatcacttgaacgcaggaggcggaggttgcagtgagccgagattgcgccactgcaaaagaaagcaaatgaggtcaagcccaggagaaatgtggaatggagctgagtaggacactaaagaaaccagcagcagtgggtgacgagggggggtgggtttgactgtatgttggctggggtttatgaagtctctcatttgagtgcgctgtaatctcctaggaagaatgtcacctaagaaacaatcattaatctccagtttaaaaactagagattaagagatcaatgatcatagcagttgaaaactgggatgacagaagaacaggctgttgaacatgagtcagcagtgtgtaggtgattgcgaaaaatagaaatgcttttcattttgttttttttaagaagtcttgctctatcaccctggctggagtgcagtggtgcagttgtagctcactgcagcctcaaactcctgggctcaggtgatcctcctggcctctcaaagcactgggattacaggtgtgagccaccgtattgagctgcaaatgttttttggctgtgctggatgtgttttgtgtgagccatgctactgctgctgtctccaggcagcctgatcagcttgaaggccacatgttaggatactttagctgtgactgtgagagttcacagggacccttcctaaggatattttgcagggtaggagaaggttattcagaagaaattgcttgccagtcatcaagtactgacactgtgttatctcttgtatctgacagagatggatgataggtatcagagtggatgaacaatgtgtgctcttggtctaagggagaaaacaattcccgcatgtgtcccattggtggtaggatatcaagtaacttctagatgtttgccacttagttgctgaagagacatcagcatatggcttatttatgaactcatagtttgctttgaattgggaaagaaatttttaaaagagattaaacattaccttctttgtccaaataagccttaccaaattatcacatctaatgtgttttcttttgtaacaaaagatttaatgcacaaagcatttagtcacaccagccattactaagaatagcttggtcagttgcctgagaagttccttaccccatgcagtcgatcctccttattcacagatttcacattggtgaattcatctgcttgataaaacgtattttaaccccaaaaccaatacacagagcacttccacagtcattttcagacatgcacagagaagtgaaaaggttgtgtcatccagtgcttatgttcccaactcgggtcagacagagacacttggccttctcatactgtacatgtgtcttttttacagtctgcttaataccatgcttttaacatttttgtgcttttgtttttggtgactttgctatttaaaatggccctgagtgcagtgctgtccactgtccccaagcacagtgaggttgagacgcacctacagagaaaacacgtgtattagggaagcttcatgcagacgcaagctcttgtcccgttgtgcgtgagttcggtgttattgaatcaacaaagcgcatcaggctaagtgcagtgacctcatccctgtaatctcagcactttgggagactgaggcaggaggatcgattgagcccaggagttcgagaccagcctgggcaacatagtgagaccctgtcttgacaaaaaaataaaataaaataaaaactagccacgtgtggtggcgcatgcctttagtcccagcttctctggaggctgaggtgggaggatcccttgagcctgaaaggctgagactgcagtgaaccaagattgtgccactgcactccagcctgggcaatagagcaagactgcatctctaaaaaaataaaaaaaccaaaccaaacaaaaaagcccaatacggtgcatcagagaaagggagaagtttgacaatatgtatataaggctgccctgagacatgctaaagcgatgtgctaaagcagccaaattcatggatttgtgagatgacagccagttttaaaaagctgtgggcaatattgttgtgtggctgaaaaccaaagcaatatttgttcacatcacccagggtcaggaaaatgttaaccccttcttggctagtgctggttggctcccaagtttcaaaaggccataaagtgtgagaaaggttaaccttgcaggcaggggaggttctgcagatcaggaggctgaagaagaatttaaaaatacttgctaagtgttattcaggaagaggaaaaaaggaaagagtgggtttccatggttgatgagcctggcttgtttatagagacattggcagatacgtctatataatgcaaatggcattttagttgatgagaatgttgtgaccagaggcttgcaggaacctaacctgtatttttcctagagacaatagttcggtgtttgctgatttggtgtgcatggcaactctctgcaactaccatgattattagaattgactatgtatttcagacattgactagttggttagagtgacagttgacagcacctgccccatttctccttgaacatgacatgtagtagaactgcagaacctcagcgttcagtgtcagtgccatccaggctgttctcaggatacaactgaaaacctggacgccatcatcatcagtgtatccttccaaacccagcaccatgattgagaagaaaagtcaagacaagttctgttttgtttttgtttttgtgatattttgctgttgaaaatagggttgtattgtccctaaatccttaaaagtcagcacagacacactaagaaaaccagtgtataattaatgtccacagcaaaatttagacacatgcctgtggttatatcatcatatatccaagactgacaacaatgcaagccatcttttgaaaaacttttaaactttttaaaaggatattgaggtattgttaagatatgtttttgcacagagacctagggacacataaatccagcctagaccaatcacttcttcctataagatcctgatgggaaaggaatggactggaaaataaaaggaagttagggagtgttttctactgtgcagcattgattccagacacaaactctcagtcccactagaactagaactgctggggtaggacctgcccacagcatctttttagcctactctggtgattctgatttgcatccttcatagaaagctaatgctctaggttagagcatgaggacctattgaggaatttcagctcagtgactgacaccatcagatttaaatttgaatgactctgatagccagatggagagaattggaggcaaggagaacaaggggctgcaggtgtccttaagtagggagaggcaggcaaccacctgggaagatgttaaatgcacacatccccgggttctgtctgcccttggagattctgcctccaggtgtctggagtgtgggactagaacatcggtgcttttgaaaagcttcaccagtgatttagaggcttaactgtgattgagacccatgactctagaaagtgctttacaaatcacaggaggaataagcattcatgtgctctgttatgtgaaagcctctatctcacagcaataaaggacacttaggacgattgtgtgtgagtgcgagggaggccggactcggtatgcaagtgtgcatggccatggaggcctcttcccgtagtgctgctatttggttgtgcattctgtctgctgagactgtaacctcaatacacatcacatattttccagatcatcctgttctttatctcagaggaggctcttgtgtccattccctggtttacagggtaaattgaaattgctaaaagttgcatttagagtagaatggatggatttggatgcctgttgtggcatctggagctgcccctttctttgctacctagcgtgtcttctcttaagagtctcacagcttttctaagccctgtctgaattatttatttctaggtagtgtgatcaagctggaggaacagaagtcagacctggagaggcagctgaagactctgaccaagcagatgaaggtgagatgcgggtgggagccttcaccaccatcttcctatgaattacccgctccgaggtgtggatcactctctctatcctgctttctcttggaacgtttccacggcatggtgggccctggaactgtaaattcttgttggcaggaagtaaaatcaaaggagtcatttggtgtcaggatggagaattctcataacctgaaggtgtaattccaccagtgccttttcctagcagtgagccaccgtgtaagcagggcctcaccaagcactgatggcatttttttcttggtgaccaacacggggactctggggtccctgcccaggcactggccctggcaggcgtctgacataaggatgggctctgacattttcaggaggagaccgaggaatggaggcggttccaggcggatctgcagaccgcagtggtggtggccaatgacatcaagtgtgaggcccagcaggagctgcgcaccgtgaagaggaaactgctggaggaggaggagaagaatgcccggttgcagaaggagctgggggatgtgcagggccacggcagggtggtcaccagcagagccgcccctccgtgagtctggtgggcaccagggccgtgcttgcttctcaatcactatgtatggggctccctggtggggatgggactcttcatgtctgtgccaggttctgctatttcctttctgagatcaccctgaattactagcaccaccttaccactaggaacattctgtacagtacccagtccctgccatgctgcagcataagaggctgctaagctcctcacttacatatgaagggccagttctagccaagtatcctgctaggcttaaagaatagaagtcctgtctagaatgctccctgaatcttagtatttattaatgcaggggagtgcacactaataaatacgaatccaccaccttgtacaggtcactcccatgcagtgggagaagctggaatcactcccaaggggaggagccgccggagaaggacacattcctctgggcccaaggatgtgcctgcttattgagaacacccatgagctacgtcaaaaggccttgacataacctattttattaaaaaaggatgagagtagaaaacatgcatttggctgatgtgtgacattcccttctgctcttgatggggagaagcacacagtgtatcagcccagggagctctactaacagtgacatttaagaggaaggtattcccaaagtgaatgcaatgttaattattatctgaaatttagatggtttacagacaaatttataaacagcattttttgctttagctaatattatatttacccaatgaggaatcagtgtccttaactttgagattcttggatattaggaaatgattttgaatttttaggtgtctctcaaatatcaaacatagtctttttagatcaaatttcctgggttttgaatgttgatcaggtggccctagtgtttacatgtttccaagatcagtggctagctcctgagccttttgatctgatgtttggttatcatgaatttcatgacattggaaagaggagatttttcagaattcagctgtgattctcctgtcaattctgctccaagtaattccttatttctttgtttataacttttacataaaatggcctttggggaaggatgaagatcagatatagctagctccacaattcactgttgaaaaatcaatatcgagatcattattttatttagttatttatttttagagatgggggtctcactatgttgcccaggctggactcgaactactgagcccaggagattcttctgcctcagccttctgactaactaggactacacatgcgccagacaaggtcattactttatagacagagctctccctctggacaccaaaggatgtgaattttaagtggaggtagagggagaataggaaaactaggtttcacagtgttccctactgaaacagtagtgaggccgttctgggtggcctctgtgtctgcttttgtttcgtttgcctctgtcttgcttccctattgtctgtcattggaagaaaatccgagtcagaacttgtgttgcttcacatgtacgttattttaatgataaatggtaaaagacaagtcctgagtttctatggtggccctgaataggttcttgtatgagatgctgtgtttcttacgtatactctgagacacaggccaggttcttctatgagatgccatgtttcttatgtatattctgagacacaggccagaccatgcagcgtgaaccctgatattctaggaaatctccgcatacgtcctgccagtttaggactccctatgctgcatcctgcatcttcaatcttaacgtcacgtttttttttaagcacagaatgtttcttttttgattttccagtgatttgcaaacctacctcccaatctaacagtttaatcccttctcaaaaaacatttcaaaattttagaatggacaccaatgagaacatgtcatggtactgaaatcaggcatcagaacgtttctgtctgtcagtgcatttggcaggaagtcagacaagtgccggagatgctggtttcttgtctgattttgcacttctctggcaagctgccccttgtaaagagttgactatatggcagttagttgctggtggttcagccacttccagcacctaccccatgagcaagacttgaaaccaactcacaccctcaaagctccggaagccacctagtgtttccatcttgactgaatgagttcttgattgaaactcagtttgactttgacagtcatctagtgagaactcaaaagtcattcttggttcagccacagccaaagaacttgcagagcattctctgacgaggtcctcaaggacaactgagagaaggtaagatcacccaaaaagcacctggatccagacatgagattacctggttcttaagctctgtttgcgtccgtgggcactcacagggttggttgcagccaggctgataagcacgagatgaagcacctgggcagaaatgcaaaccagcattcattgctggaactcagtaactaaacagtgggatattatctaactcatccatgatcttcggtcctgttacactttcacagatatttttatttcagagtcagaataactgatgttaaggtatgtggggaaggaaggcggtagcctcatctttgcagtcaaccagcaatatctcattcccagtgtcatgtttgcagccaaccagtaacatctcattctcagccctgcctcttgcctctgttaaaagaggtgggaagagggggtcgtttttgaggtctctttaagctctgctgttctctggactggttggttagctgacctttccctggtgggagagtaagaaactccagtgccagccttagagttattctggtgcaatgccttgaacctctttgacacagtggcatctccatatcttagttgtggcttgggagcctgctctttctcttccagaaatgtgaacaagccagtgtgtttttagggacctaaaagtgatctgtttcattggacacatataatgtaatagatgaaaagataataactttttcagctctggctcctcccagttttgaaaactaccaattgagaaaaaggctttgaaatgaaaactctcactgaaatgaacccgtcacatctttttcctgaaaagttgagtcctgggacctggcaaaaacagaaaaaacacaggcagctcaatgtaatgatatattgtgccgcatacaagctttctaatgaaagacatggttcgtgagcagtgcatggcacaggcttctcaagcagcatcagggaaagacctctgtgtttgtggcatttgttcctcttgttctgaaacagcaaatgccattacttttagggtgacttatctgattcttactgtgtctgtcatataacaccaataaacatccatggaaaacgtctttaaaagagataattaaacacacttaatatctgtgcctaattaatgctgttggtttctaaatagaatgtctgtgattcgaatgtgtttcattttgcctataccacaagttcttgcattgtcccctcttggaggtgagcagtgtggcagcgcagcacgtgcagactccactggaattggcttaactccatgtgtgcacatccgtgtcagcctgagtgtcactgtgtgtgcctgtgctgccctctgtgttgctctgatggctctaatgggtcacagccgctcagcatgtgttctccagctaccatggagaggggaggggcggaagttggaggtatagattctttaaggtcccttttccagctgtcttgccacagatgctctgatactgagcccctctcccaggtggaggggggctgttctcctgaggattcttaagcagtttctgaacagacctcaccttagcacccatgacggcatgatggacaggggtctccagcatttaatttggcccttgatgcagaacctggtcctctcaatgtgctcttattccagctagcattatctgttccctcacctagtactctttttttcatagtttaaatgtacatttatgacattagacacacagtctataattctaaagagctgtgtctgcctccctgttctctgacccctgattttacagatttcaacaatgtggacataagcttcccttaggcctttaggatttttaggttgcagttataaaagcaagaaggtttttggccttgacagtagagagaagcatgagcctctgtaaattctggaggggcctatggtgttcatcctggacatctctgcttcaccacacagttctttgctggagaagttctggtggaggagcctagtacaggcatttgcagtctggctttttttttttttttttttatgtctgaaaacctttggcttccaaaaaattggaacagtaggacttaaaatctgttggcctatcctggacattagcttttccctgtgggacagtgtaagctggaaattcttgcgtttgtgaactaagactgtattgccttaggtaactcctttacagcctctccctcccgtttctattttcacagctccctgggctctgtcagctagcagagcatttggtggaagaaagacagcccagctcttgccatgattgggagccgcagccatctctagatgaaagggggaatgtgtagaggagaaattgcctctttataaagagcccagttgtctccttgtgacattctctgtttctcagagtcattgccgtcgagtctctgctttttgtccacattttgggatcagcttactgcatgatcaaagatgatgtttccctctttttacttttcctcagaagattgagctgtcttttatttggagaataaaatgaagttctgaaaaaaacaaagtacaagtcttatgaaaagttatttgcagctggagtgctgaaaagggcacagtggcagagcagatgcagagctgggtacagcgcaggcccgagttcttttgttttttgttgttgttgttgttgttgttttgttttgttttttttttttttttgagacagagtttcactcttgttgcccaggctggagtgcaatggtacgatctcggctcactgcaacctctgcctcccgggttcaagtgattctcttgcctcagccttccaagtagctggaattacaggcgcctgccaccacacccagctaatttttgtattgttagtagagatggggtttcaccgtgttggccaggctgctcttgaactcctgacctcaggtgatccccacctcagcctcccaaagtgctgggattacagacatgagccaccgcacccagaacctaaggcccaagttctactttttggtgttcatttctctgcttccttttgatcgtggtgtctgatcatcttggaattcacattactcaaggcaaaataggaagccatctgcgtgatgtcacattccgaagaagtcagaaggttcggcgagttggagctttactcttgttgcccaggctagagtgcagtggtgcgatcttggctcattgcaagctccgcttcctgggtttaagctattctcctgccttggcctcccaagtagctgggattacaggcatgtgccgtcactcctggctaattttgtatttttagtagagatgcaatttcaccatgttggtcaggctggtctcgaactcctgacctcaagtgatctggccgcctcagcctcccaaagtgctgggattacaggcttgagaccccatgtctggccccttctgtggggtcttgattgagccccttcacttggagtctgacttcattacctcgtctgaaacaaggtgcctccaagctttgggttgatttccagaatcttgttgggttaaacataagtagaagtttgatcataaaggatgttattaagccggataggtaagcacggtgacaatggcaatagaaatctaatggaaaacgattgaatgacaactacaccaaagtttcatggatgaaactcaccccagaaacttagtgttcaaatcagagtgatacacaattcaaaatgtgattttaaacttctggaaatatgtgtgtttgtgaagatccaaatccaattcagcaacctccatcaggcagaaaccttctgcaatcctcacatgaggaactggttcacagtgtacacagcatggagccattagtgacgttatccaaaggatgagacaagacaaaagttactgtctaataaaaggaaaattaggaacaggaatgctctttaaactcaggaagatcttttggggtgtcaaactggacagcacagaatcattagaaaaattagcttggcgtgagaagagacattgaggtcttctctgtaaaatttacttagatacttgtgaataggactgaaatttatattttgggcactctttacctcagattcagagttcttaggattatttaaaattcatttgctggatgttttcaagtataaacaataagaaaactgcaacttcaacttaaaaggcactgctgtatttgcaccctatattttgacctgtcgttaggtactgttgaatatttttatctgtaagcatttatgaagtgcaaaataaacatgttattatatagaagcgtctgctgcttagttttaatcaccagctacgtttctgcagggcctttatgtcgttttgttctacatttttttctgaatacagtttcagaacttcaaagtcacatcaagtaactagaatttgaggtagaaaaaagctggatgtaagttgtaaataggaggttgacatggaatatgaacagtttcattagtagaacaaaagggcatggagtaaaaatgctaattttgcataaatttttaaaactctagggtctcagaaaatatagcatggacttaaagtctagatgtgttttgttgacatttaaatatgaatagattgatgatttaatgtattggattttttcttaattatgaagtattatttaggtatactaataacaaaatggagacgtgtgaagaaaaatattaatctttcttctccctcagtaccacctgtgaggaaatcagtgttaacagtgtgtacatttttctttactcatgaatatgtatagggttcattttcatatttttaataaaaattggattatattcttttcagtactctgcacctttttattttatcatatcataggcatccttccaggtcaatacatagaaatctatcttattttaagagcaacatgaccttccataggaaggatatgtcctggaatattaaaatattgtcttactaatgcacaacaaggttataattttttttttatgagtaatgctataatagcagtccttattcatatagtcctatgtagttgtggttttatttttatagaatgggtttttcaaaatactattgctgctctaaagtatatgcacatttttattttaatagatgtctccaattactcacctgagtgctgtgacatttcactcttgaacatgcccatctgtatacatcctgagcagtagtggagagccttgatcatatttttgccaataggataatcaaaaaatactatcttattagcactttaatttgcatttcgctgagttttttttttttttttttttttttttttttttaaagacagggcctcactctgtcacctaggctggagtgcagtggtacagtcatggctcactgcagcctcaacctcctggacttgagcagtcctcccaccccagcctcctgagtagctgggactacaggggcacaccaccatgtccagctaattttttttttttttttttttttttttttttttggtagacacgaggtctcactgtgttgcacagagagactggtatcgaactcctgggctcaagtgatcctcccaactcagcctcccaaagtgcagggattacagccatgagccaccatgcccagccctttctaagcacatctttgtatgtttactaaccactgcattttctcttctaagaattactagttttgcaacttttccctgctttttcactgagctgattgtttttttctcatcagcttataagtcagtattttattagggatacggttgtatcccctatattatgagcctttatcatatttttcatgtgatatggctttatctttatcatagaaaattttatatttttatgtaaactgttagtgttttcctttactcttttttttaagattccttctccccagtattatacaaatgtgctattaaatgtcttcatctacttgatgcacacacatatgcaggccatttgatccacctctctttatttaatctgatgtgaggtgtggttctttttctcccactgggtagcactgtttattaccagagtcatcctttgtccactgaattgaaatcccacctttacatggtttatgtcatccacattcagagagacctgccctagatgtgctcccatttctttctcttttgagttagctctgctttaaaatattcatagattattagattgcttatattacttttaactcatcctttcatttaaaatttttattttattgaattttaaggcagacagtatcagtgttgaactctgtttccagtcatgaatttacaaacgccagtcctctcttgagtgcagtttccccttcactttgtattatgaactgtttgcatcgagcagggcatgattttgcctgtcaccttctcttgctgaagcagatccaggtgtggcagggcctgacgtttgccccaggtccgtgtctgaattctgctcagatccactgcctttgcctgacagtgcttctgatcttcttctcatgacttaaacgtgttgggaggctcttgaaggtacatttgtattacatacttggaggtacagaagcccaggtagagtagagaagggtgagtgcctagttgggaaattcacctgtacccagtttcttctctgcctggtgagcctggaacgcagagccagctctctggatctctttgcgtgcccctcatccattttaggtgcacactgtggctcttcctatcctgccccttgtcactactgccctttatgcctagggtaaaccaaccttggccttctcggatgtaaattcttcttgttcctgatcctttgccaaaacgccgtgcatctctctgggcttctcatgctcctctccagccttggccctctagggtgggggacattagttggggttttcccatatctccattttctttggaagggaattgagggaaagcccttggtattgtattttcattcccccgaccgtgtactctctattagcagaaattcttcagaatctaagccacgtcaatgatactcgactacaggacttttactatttgattcttattgttgggatttgtagattatgatgctggtgttcaaattactttcttatcctgtttgtttttattgttatatatgcttttactgaaatttgaaagtgaaatttagaagatattgtttgacacctaagagacaaagtacttcataatttctgtcttcaaatagagtgaaaaacttctgttagatttgttttatgcaaaataagtatttagaaaaaattacattccaggcaagggcatagaatgagcaaaggcacagaggcagggcataaaagtaaaaaacttcaggtgaatagtccaaaactagatgggcagaggggagtcttgggagattaactgaaagacctggggttgggctttgttcaggtgttcagtaaagagaccggcaggcgtgagcatgtggttgacatgcgacccgccctcttcacaaatattaatctgccaattgtgaaggtagcagtggtgccatacaacactacccaaatggagttaacctttgaatactttaaaaatcatcatgtacaggagctcacctgttcctggatcagaatgaacaatgacataaagtgctgtttttaggaagtaaatgctgtagaccatgactgacatttgaaaactctgttctctaacataacaaggaaagcagcaaattagagaggttaaataaaagttttaaagggaaataattagagacatgtatgtatatgtgcttaaatgacaaggtgaggcatggaaggcagaccgacattcagtgaggagggccatgtgccttgctgtgctccatggagacactgtctgcttatggagtgtgcatcacctgctgtgtgtgacacagcatcaggcggtctggcctgcaactgttgttctctagtatctggcctgcaactgttgttctctagtatgggttgccgccttttaagagcagattattgtataaagataggaacactgaaataacttggtagtattttttaaatgtacttaaaatttaggaagaaataccatcagtattatttctagaaccttgtatatctctcacagaacatttatgcattatagaaaatttgagaaatgcgtggccagagctggatttgcaccccagtttcaccattcatgaatcatgtgaccatggtcaaattttcctctaaaataagggataataatatctagttttgttgaaaattaaattagataatgcttttaagacacatggtactgtgcttggcatatacagtggagttatacacattcatatttgttttgctgaaattatcgattattatcccagttttatatgctgggagcaggtagaatacttgcttcatttttgttgttttaagcatggcccctaaacactaagcacctatttaatgtgtgatgtaactgaagaaagagccaatcatgaaatgctggagggaatgcaagtatgtgagacttctggagagttggtgtgtttgtaaacagtcatgtttacaaaagcatgtacttttgagtgactcaaattattttcatggtttatttgactacatgtgtgattattactttgcaggttgattttagaacctaacatcagccttagaggcagtagcaagccttgaacaagtgtttctccagtagtggtaccttgcagtttttcttttatttaatgctaagacatacctggctgtatacttacatatttcttaatattcattatagaatacagagtttttattcttccttggaacagaggaaatgtaagacttcatttatggctgaggctgttactaattgatcccagccaattctaaaataggctggtgtaaggattttcagcctcatttatgatttaagtacatactaataagccaatagcattcttaataaccattttctttggttattcaattcaggctatgttttgtgaatccctctcacatacacagagagacacacagacacacacacacataccactgttacataacacagtgggtatttctcttctcaaattatacagggttttctcatactgactcttattgttctggccaagtagacttagtgtttgaaataccatctttggatacctgaagcctgaggtaattgattcttgtggccttgctttttaaatttatcatttgatattttgaattgcagataaatttagataactgaaaggaataacctcagcagaatgtaggcgtctccattttgttcttattaaattatcaaagaatgaaatgtaaaatgaattatttaaaatgattgtccttgggggcctttggtactgagtcatttaaatggactggtaagaaggtggccaggcgcagtggctcatgcctgtaatcctggcactttgggaggccaaggcaggcagattgtctgagctcaggaggttgagaccagcctgggcaacatggcgaaaccccatctctactaaaaaaaaaaaatacgaaagattagcaaagtgtgctggtgcttgcctgtagtcccagcaagctacgcaggaggctgaggcattagaatcgcttgaacctgggaggtagaggttgcagtgagccaagatcacaccactgcactccagcctgggcgacagagcgagactctgtctcagaacaaaaaaaaggtggcccattttgtttgttgatgaccttcatgagaatggctagcacagaccgaggaaattattttctgctcaaacctaacctgatttctttttctttctgcatttttgccacctgattttattgtatgggaaagtatgaaaaccagttcctctcaataaaattatttaaaaattattttaaaaacccaacctcctacaatttctgaagtgcctgataatttcttccaatgaagttttcagtttactgattttttttttcactcataagaagggactgtggagtgaagattgtaaggcagtgtggtttaactgttttaagttctgtttctcttaaatttattctattcatgttatttacagagcaacagaagaaagcttagagaattaaagacaaattcaactggagaagcttatgagtagtagctagattaatttgaaaatgatcagtaaataactattttatttactgatttattttaaacttccaccgaccttattgaaatatacttccagaaacattctgtttgaactattatcataaattagtcatcttgcaaaacagctgtggcaatatgatacaatgaagagagcagtgatttagcaatgagaaggttgggagttcttgtcttggctccttcacagggagatcacatgacatgccaaagtcccctatatgaggaagccatgcattgagaggattgaggattgggtcaatgatctatcatagaatgctttctatgagtctagaagcctcatgaagaacacaccaggaaacttgggtgagagcaggagcttcacctcatgcagaattgcagtgtgattttagagtgctgttaccattcttatgcttagaagtcagagtgtctgaatcaggattctgttgtgtataatggattgcactctcgttggcttaggcagaaaggtgttaaatggtttgcagaattgttgggaaggctgagcttccaggagcagctcccaaagtctccacacacaactggaccaccagggaacctgctccctccaccaggacaggagccttaacttcagaaagctgcccacccagttggaaagctgccaccacagttgccagcaccatagcatcttgtctctgctacagtctctgtctacatagtgaatgcccggtgccctgcctctcttcctctgattcaggtcccactccaggtcttgcccaagtctttctgattggtggaacttaaatcacacccaaaatcccagctgtaggagagctgtgagatttcatctttccaaactctgtgtactgcatgggggttggagcacatgtcggcagccggtccactgcattcaccattgacagtaggtgaaatatttatggtcaataacatttgcattttttcacaaaaaatgcacaatttgcagagtagccatacacactttttatttagagctaatatcaagtcactctacatataaaaataattatttctgaccatttcccaagaaaacagctcttctaaaaattgagagcaatgcctacattatttcctaaagatgcaaactggtagagaaaacaggatgttaaattcagaatttcccttccagcttcatttattttctccacatcagttctgttttcctctgtgtctttttctcccatggggatgtcctccatcttttcaatctgatttgctctttgccatgcagacctgtggatgaagagccagagtcctctgaggtcgatgctgctggtcggtggcctggtgtctgtgttagcagaacatctccaacacccccagagtcggcaaccaccgttaagtcacttatcaagtcatttgacttgggacgcccaggtatttaatcattttttctataagcaaagctccaaattcaaactttggcccgacatttgatatgtctactatctctactccaccctggccctgtgttgttacaaccacaagggcgctttccaggtcctaccacgtgcagccactgcatgcaggagcctggctgaggctccagggaggcactgatggagagcctggctcatgaataacacaaatgcagcctcttcctctctaccgcttccttccatccagttcctgccttgctacctttcttttctgcctctcatagccattaaattcaggtcactactatttgcctttttgtcatctcatgagaattatgagggtcagctggagacttcatctcctaggaaacgagacatcacatctctgcacctggccctcttggaggcacccctggccatccccatcttgcaacctgctagacgtttttctacctggtcttgtacgtgagcacctgtgctaatctgtcactcctgatctaggtgtgttcccagcttttcctggtgttgtctgatggtctcacaattcccctttagtcatgcttatcttcctatatgagaaagatgcgtagctatacttcatacatatactgtacacataaacatagcaaatagaagaaacagaatgtgcatctgtctacagtaacaatatctttcttccccagagtgcaacaaacatgccattgtattgggagactgtagtaaaagttaatcctaggatgtacctggttgtctctgctaaaattgtttgcacctaaattagattaagactagactctacatattcaaagacatgaaagcctttcatgtctgtgaagacaggaaatgaattaacaatttgtacaagaacttttctgttccttccttctctaggcatctcattatttatacagtttctttttgctcagctatccttcatctaagactgacctccactcagctaaatcttcccttcttgtttccccaaagcagctctagtccggagaagaaaaggataatagagtaaatattacactaaacacggatactccttaagccaccaaaaaaagtaacaagaaatcaggaacaagtatatgctattttgaagtggaacaacatataaatgttcccatgttttttcttggcaggtggagctggacagaatatttctgtccataagacccccagaagtcccctaagtgggataccagtgaggactgctccagcagctgctgtctctccaatgcaggtagatgagccccagaaataaccactgcttatggtttgctgtgtatccctctagatgtttttctttacacatattagtgtccgtgtgtgtatgtgtgtgtgtagagtatgtgttttgtaaattggattgcactatgcattattccaatacttatttcactttatcatcggaatgtaagcttcatgaggtcagatatttttgttcattttgcttgctgttttatctcttgtctgtaacactggttggcacatggtcacattatagtagaagttcaataaatattaaatgaatgaaggaatatgttttcaaattttaatatttgcagaaacgattctttttataaaagattacataatatgtggtgatttatttagccactgttctactgatagaagttaggtttttttggatttaacttattacaaaaaataatacagtgaagatactgatacaaatttttgaccacttaaggggctactttttaaataagggtatatcaagattcatttgtaagtatcagagatgactgtagttaagcagaaaggaatttaatacagggattttggtactgagggctggagaaaggtctaggctgcactgagcttccaggaaaggttcccagagcatctgaaagttggcccattaaaggagcttctgtttctgccagaatcgggaagtctttctctaagtgcttacccaggactgccactgctaccaagatctaggatcagcctggtgactacactgccacaggtgcagtccatgccagaaaagcacactctgtgcctgccccatactgaccagaaaacggtggaacagaccccagaacctctgctcccctgccacagaacagcgaatgccttcccagccatgtttaccaggagaagctgcagaagggaagccttacactcccttgcaccttccagatcctctgagaaggggcctgtttgacagaagctaggccacttgatgagccaagctttaaaggagtttgccaagtacaccctttagcttcccagtcccttatagttcaataagtcgccctacaaggagatgaggatggagttgagtgagcccgtcttgagatcttctacaaattgattcctagtgaaggaaaatggagtcctagaaaaggaaatgtatttgacctgttccagcatgtcgaaaaacttgatagacacattgcccttcagtttgccctcccgcttacagtactattttccaagaattttgacactgtctataatttttgaagatcaagtaagtgaacaataatatcttgttttactttatcagtaaggtggagcacttcttcgtatgattataggccatttatctcttgtgtgtcggtgtggaaacttacatactttgcctgcttttcttttgaagtgttagtctgtttatgttttgtaagaagtattgatatattgtgctttttaacattttttcatatgtaattgtattaccttttttatcttttaatgtcatattaatagttatcttttactgaagagaaattttacatgtttgtgttgtgttttaagattttgttttgtttcctgccttaaaatgtcttttctagctattagatgattaaaatattctccctaaatatcttaaggaagtcttttatttcttcagtcttaaaacccatagaaacatgggtttggatttagatattcttcccctatcttaactgccttctggaagcagaagtaaatactctctggaggacaattacaccatctagatccttaaattatagccacattttaaaaaatacaacgttatatagtaactttaaacaataccaggcatggccaggtgcagtggctcatgcctgtaatcctagcattttgggaggccgaagcaggcagatcacgaggtcaggagttcgagaccagggtggccgacatagtgaaaccccgtctctactaaaaatacaaaaatcaactgggcatggtggtgtgtgcctgttgtcccagccactcaggaggctgaggcaggagaatcacttgaactcaggaggcagaggttgtggtaagctgagatcgcgccactgcattccagcctgggcaacagagcaagactccatcttaaaataaaataaaataaaacaaaaaaccaggcatacaaatagataataccaaatgatgaaaagccaagagaaaaaatagacaatagaaacagacacggaagattcagatattgatattattagacatagaccctaaaacaactgagattaatgctgtcaacaaaataagtgacaaggtagagaatttcagcagaaaaccacaatgtataaaaaagaatctgttagagattttatgacttaaaaataaaatacctgaattaaagactcaataaagtttagctgtagcttaaacagtttaagagaggcttaaagaactgaagacaagtcagtataaatatctgaactgaagcacagagaaaaaggataggaaatagagaaaaggacataagaaacatatgggatggaataaaaaaatctcatgtgtaattggagtccccaaaaggggagaaaaagagcagaagtgatattggaagggataatgatcaagaatttccaaaactgataaaagatgtcaagcccagattcaagaaacaataagaaccccaagtgagataagtacaaagaaaaccacccagacacatgaggttaaaactgctggaaatgaaagagaaagcatcctaaaagcacccaaaagaaaaaagatacctcaatgtccaaggaggaagagcaaaactgacatctttcttctcaagaagaatgatggaagccctgaagacaatgcagtggcatctgcaaaatgctgaaagaaaacacctgctttcctttacctcatgaaaatatgcttcaaagtgctgtacctggtgaaaatacccttcaaaggtgaacacaaaagaaagatgctttgagtccaacaaaaccagatgttttttcctaggatacttgcagtgaaaagactatttaaaggagttctgcatggagtttgttcttttaaaagactattaaaattcaaaacatctgacaagaaaagctaatgcaaaattacctgtatcaggaatttgtaaatgggtacatcactaaagatttcataattattaaagcaatagtaagagaatattatatattactactttgtgctataaattagaaaatattgatgaaatggtcaaaatcttagaaaaatgtaacgtgctaaacttacataggagagagtagtagaaaatctcaatcacctataatttatatcttttccttaaaagaaatgccagggccttatggcttcaccatgaaacctcccaaacatttaaggaagaaataatgtcaatcttacgtaaattcagagactaggaaagaggtcagcatagctttgatccctaatagttgcaagaacattaatagacaagaaaattaaaaggtctttctcacgaacctctttgcaaaaatcctgaacaaaatcttggaaaaccttattcagagacacatgaaaaagatcatgtcatgttgggtttattccaggaatggaaggtggttaatattgaagccaaccagagtaattcaccacattaacaaaggtataaaaagaatatggttggccaggtacaatggcttatgcctgtaatcccagcactttgggaggccaaggtaggtggatcactggaggccaggagttcaagaccactctggtcaccatggcgaaaccccatctctactaaaaatacaaaaattagctgggcgtggtggtgcacgcctgtaacccccagctacttgggaggctgaggcacaagaatggcttaaatccaggaggcggaggttgcagtcacctgagatcattgccattccactcctgggcgacagagtaagactctatctcaaaaaaaaaaaaaaaaagcatatggtcatcttagtaggtggtggcaggaaaatgtagtcgataaagattaatatctttcttgatggaaattcttagaaaagtaggaatagaagggaaagtctttaatctgataaagggtctgtattatatatctacagcaaacatcatacttaatggtgaaatatcggatgctttcccacaggattgtgaatgggataggaatgccccatattgtcacttttgttcagccaacttcaaaagcaagatttaaaactacttttgaaaactgtataccacgaccattatatttttgtgggatgtggatacatggaattgtgtttaatatgctatgaagtagagcctctaagagaaaataatgttctggaaagcctcagaatggccctgcacaggcaaatgtaccaggttgttcattgcagcattgttcctaatatcaatatcaacatgaatatcaatagagaatcagtaaaataaattatggtaatgaaaatagctaagatctactgaatgcttactatctgctgggctgtgttttgattgttctaactggatttaactcatttaatcctcccataaccctttgaggtaagtacgtttagtatcgttgccattttataaataaagaaaataaggcacagaaaattaagtaacccagagtctcacaggtgggtggtgccatctgtccccagagccacttacttggcctcttgtggcacttctcagaggaagctgccaagatggtgggtgatggtgggtatagaatgacttctaagatacagtaagtgaaagaagcaaaatggtgtacaaaacaatataatgctatgataacagttgtgtttttagaaaaacagagggtgtttttcaaggtttttccttgaataatatcatgcttacttgcattctgaaatgcttttttaaatggcagtaaaaaaaatacaccatgaaatctactctattaacaaatttttaagtattgttaactagaagcacaatattgtatggcaggtctctagaaaaatttttttttaaatttttaattttatttcagattcagggtgtacatgtacagatttgttacatggatatattgtgggatgctgaggtttggggtatgattgatcccatcacccaagtagtgagcatagtacccaacaggttttcagtgcttgcctccccctcctctagcactccccagtgtctcttgttgccatctttctgtcctctagaactttgttatcttgcctgactgaaactctgtatccacggaacaattccccacttcccctccctgaggcctctgggagccaccactccactgtctgcttctgtgattttgactactttagattcctcacgtacatagagttatgccgctcttgtccttcagtgactggtgtatttgacttagcataatgtctccaaaactcatttatgttgtagcatgggacaggatttccttcttttttaaggctgaataatattccattgtatattctataccacattttcttcgtccattcatctggtggtggacactggggttgcttccacgtcttggctgttgtgaattatgctgcaatgagcaagagagtgcaagtatctctttgagatcctgttttcaattttcttggataaatacctagaagtggtgttgctggatcatttggtagtactatttctaattttttgaggaacctccatactgttctgcgtaatggctgcaccattgtacattcccactaacagtacacaggagtttcattttctctacctcctcaccaatacttgttctttttcagttttttttttttgatgatggtcttcctaataaatgtgaggtggcgtgtcactgtggttttggtttgcatttccctgatgattagtgatgttgagcatcttttcatatacctattaaccattaaaaatagaatacttatacacacatccttgaatatacatagaacattccaggaaagatattcacaaagccaattaataatgattgcccttggagagaagaactgggagatgggaaggaaaaggagactttctcttcattatttgcccttttcattgcttttggggatagtgtctattgcatgtattacctattcaaataaatgagttaattaaaaactcccctggttattccactgtgtttaagaactgttgcacacacacgcatgcacacacacacatctgtgtttgtgctattcttgatgttatgagctcaccgtgctggtgtccccctggtttttacagaggcattcgacttacagcagtgtgcggccagccagcagaggggtgactcaacgcttggaccttcctgaccttcccctctcaggtaaattatgtcaacataaagaacttttgacttatctttccgtgcagttaacttttcttcatttctctgcatgaaactgagcttagaaaaataatcagtggcatttcttgcaagtgatttcaaccccgaataatgtacatatcatgaatgttagatgcagcagtgcagctgacaaaaggaaaaagtgtctcctgccagctgcacttctcagtgcccttgtgctggggagacaggcccaattttttttttcttttccttttttcagagacatggtcttgctttgtttcccaggctggtctcaaactcctggtctcaagtgatcctcctgcctcggcctcccacagtgctgggattataggtgtgagccactgtgcctggcatattgttttttaactgaacctcaagagcatattttctaatctttaaaaagtaactaagggaaaaaatcttacctgattttgaatttgtctgctacttctgcaattcttaaaatttgcccctttaaaggtatttgtcttttggtgcagtcctcttcctgttgttacaccgtgtgtgtgtgtgtgtgtgtgtgtgtgtgtgtgtgtgtgtgtatttgttttttgttttaactccaatcctggttgtaaagtggaggttgcattcagcagtcccagcagtccccatccatcacatttgcgtggcgtcatatttcctgtgtcacaggctgatgtgaagcagccctcaagaagggacacgtgggcttgagtctcagtactgctgctcagcctggctttggccccatcaccccacttctctgtgctttagtctcctcatctctaaaacggaaataatccggtccacttcctaggattgtatcaaggattgagttagcacattaaagcgccttgaacatgctgggtgtgtggcaagcactgtggaagtgtttactgtgcacatctcacctgctgttctctgctgacccagttcgcctgcccagaactaaagggacaacagtgctcaagcctagtgggaagttaaggttgtccagaatacggggcttagaacctatgtatgtgtctatgtggtgactgttaggaaataaaaaaggcaaaaagaacactgaatggactgtttactggtccctgtagaagggatagaaagccaaaagtctgggtcacatggacagaaatccttttgtttctaagcataaaataaaatttctacagctgtacttcctttagatcttggtcaaacacaatcaggcttgttcttaaaatagttgtttctatgagggaactttcccctctgaatcttctttgctttttcatggaattaaataaggattttagagttgggtaaacactgacaattgagaatttgaagatgatctgagcccattcctcgagttttacatgggagagattcaagccctacagaaattgagtgacttataaaggctacagcgattttggatggctgtggggccaggaagtctcctgattctttctaccatgtgcctcttggtgctgaggctggtgattgctcgagtaatagctttctaaagtggtgaaagtttacgtgggactccaagtcatgatagtgacttcccagcagaaggaaatgaagaccaaaggccagtgtaaagtcaagagtgtaagaacaaacagagttcagtggaggtagagaaatgagagagtacgtgctccaggagaccaggcctgagtgtcccatactaggaggggagtggaggagaccagagcacagcaggaagcccacttggctcaccatctccgtgcttgctgtgtagcacaaaagagggaataatttgatgacacgcatagtgctaggtgtggggtttttgaaaaattgtggtaaaagacacataatataaaatttaccttatcaaccatttttaagtgaactaggtaagcctttggtagataatatttgttcttctctctgttccactagccttaaagttttctattgtgtagagacaccattctttctggttttctttgagagagagtcttgctgtcacacaggcaggagtgcagtggcattatcatagctcactacagcctcaaacatctggcctcaaatgatcctcctgcttcagccttcaagtggctgggactagaggtgcatgtcaccatgcctggctaattacaaaaattttgtggggggatagagacagggtctcactaagttgcccaggctggtcttgaactcctggcctcaagcaatcctcttgccttggcctcccaaagcgctgggattacagttatgagccatcatgcctggccaagaaaccattcttttttttttttgagatgcagtcttgctctgtcacccaggctggagtgcagtggcgtgagctcggctcactgcaatctctgcctcccaggttcacaccattctcctgcctcagcctcccgagtagctgggactacaggcgcctgccaccatgcccggctaattttttgtatttttagtagagatggggtttcaccgtgttagccaggatggtctcgatctcctgacctcgtaatccacccacctcggcctcccaaagtgctgggattacaggcatgagccactgcacccggccaaaaccattcttttagttgacacggtacatactgaacttgagaccacaatagcttattgctctgcagttaatatctcattgacagccctccctacttagcccccaccaggcacctgtctgcttggatgattatatttactgttattacagcaaaggattacagtgacaattacttgcttctagcaatccccaggaattgcttgtcaacactgaggtcattggaagctgcagaaaccaaagattaatgtgctgttcttgttgttcccttggatgtaaatactgtttttctctgctatttagagctgactagcctcactcccaactttactgcccctaattggtggcagtgagctgtggaaggattactttcttctgtgactattcacaggtcatgggcggcaactgtgggctcatcctggtccctggtctgctctgtagcttagaacaaggcacttagttctctgagctccagtttcctctataaatataaactagacagtctcgaaagatgtctcctgttccgcacttttatggtcctttgagaaatatagtctggctagacatggtggtgcactttcctgtagtcccagctacttgggaggctgagacagaggatcattaggaggtcaagtccaaatccagcctgggcaacacggcaagaccctgtctctagaagagaaaaagaaaaacaagtatcatctggaggattcagttcatttcattacctgttttttgactcagactaatatgacagcagaaaggagccttgaaagagtgattcctacttcttgtttagcaagccaggccctatggctagaatggccttttctcttgtcaagtagttcttcttggttcccagcttcttgtttattgctgcctgtggtctgatcatcacttgaggcattttcctgccactctctctcagatgtctgtcagttaaaacaaaagatactacctggggacagggctggcttcgttggcacttgcacaaggcccttagaaggacacatgcttggtgtaatgctctgatgacatcatcttgaaattcacagtgatttttgagcaggaggttgatttggtgctagatgctgtaaatgatgtagtggtcctgcctgtagaatccacatccctattgcatttttattacttcagaaactatatatatgtttgcacttgaggataaaatgagaactgtattgtatttgagaatgaagtatgatggcagtcaagagctgcttctttgggaatgagtgattatgtggttgttcccacagatattctaaagggaaggactgagaccctgaagccagacccccacctccgcaagagtccctcactagagtcactgagcagacccccgtctctgggctttggggacacaagactgctgagtgcttccacccgggcatggaaaccacaaagcaaactcaggtatcgtgtttcaaacaataagaaatcagaaaaacatcgggctaatcaccttttattcttccttccgttttgtccccgtggccaatttacttctacaaatatttcctgcatgaaaatgactaagacactgtgcctgcccttggtgagtctaaaaggatgacagtggatagtagtagtgcgcaaaatggaattaagggctgtaaaaaacaatactgcataagcaaagtcttgagaggttgttagttggatcaagaagtctagagagaagtggtgtttctgccaagggctctaaaggtaccattacaagcacgctgtggaatagtgatcagggaatgtgggtggtgtcatgtgtctgaactagtctgtgggcttcctgagagccgggactctgctgtacatatgcataacaagctctctgtcagtatttgttgggtggatggataagtgactaggacattccatctggagggcatattgtaagtagtcttcattgctaaggaagaggtttgtgcattattttggtaaagcactggagtaccaccaagtttgtgggattttgtttcggattttgaggttgtacagtgagattggacctgcattttaaggaggattcatcagaaaacagtggtatataaggattgaagaggcattttgaaatcagtgtttaagaaggactgtcacagggatgtaaaggaatggttggcagagggagaggatggcaagaccagcagggtggtcactaagagcttgtctttgttcccacacctctgtcacctcctccctttccagtgcccctggtcgcccaggccacagcaaacctctttcagctgcttcctctccccttgtgacttccctgcttctctgtgttggttaattttctgatgcactgagcacatcctgctgcagaccttgcagaaatctcacatgactctgtcatctgcactcctcatcctggtcttctagatgccccacaacttagcaccaccccacccacctgccagaatggccctgttcctccctccacctgagcctgttttagtttctgcctttgtaatagaacatgaccatgtctgattgcaagtctttatgtataaggttctagcctgaatcgtttttcttttctcctttcatactccaaatactgcttctccttcaaggtcaaacctttcatgaagttgtacctaacacctggcacattgacatatcccttctctgactttggcgtcttacacttttttgggtgtttagtttttgtactgctttgtagtgtggaacactgttgcacagtacatgccattgtctccatttatgctataatttagttgacagtaaaagttcaacttacattttggtatctcttccagccccttgcattgtgcaacacacatagcatttcacttagtaaaacttacgagtgagtagatggattaatatacaaaattggctagtttaggagtaatagctttttaataaatcttataatcacaaatatgggtattatagaaggatttataaaagtctgaataaattcaggtcttgttacacctttgggtacagcatatatttggacccaaatagatgaagtcatgtgtttcagaagtttaatgtaaagccccagatactacatattgtcctgtttatgtgcaagagatttaaataatcaaaagaggttttaaggaccagaattagtgctgttctgaagttgccgttttctttatgccagaaatgcatacaaaaaggctatatgtatatgaatatgctattgatattttaccttttttaatgaaaagttaaattagtaaaattcttatttcaattttacacttacgttattgacataaacaatggcaagatatttggtgtttttaatatgcccttccaatgcacctttaaaatttattttattttattttttggagatggggtcttgctctgttgcccgggctgtagtgaagtggcacagtcatagtgcactacaaccctgaactcctggcctcaagcagtcctcccttctcagcctcctgagtagctgggattagagatgcacaccaccatgcccagctaatttttttattttttatttttttaaagatggggtctcgctatgttgcccaggctggtcttgaactcttgggctcaagagatcttcttcccttggctcgtaaagttctgggattatagatgtgggccactgcacccagccaatctaccttttacatgttatttaggtactggtttagtcttgaaacatgtagggtgtgttttgtttacgtatctttaattcaaatgatactgtacttaagtaaacaaatgaaagactagatggatgagcaacaaatggatttgaaaacaaaatgtaacaaaactctccccaaatttatgatagtcaggaagcacaatttaatttttattttatactgtgagatatcacaaaatagtaatgtgactaattcggctgtttctttagaatcttgctggataaactagacttttgcttttctaaagtaggtatttatttcttgtgtatttgagaattctaagtattagcatcttctccttaccatgtgctcttctttctaaccagtgtggaaagaaaagaccctctggcagccttggcccgggaatacggtggttccaagcgcaatgctctactgaaatggtgccagaagaagacacaaggttatgcggtaagggacaacatcagccaacttccagctgcccctgggcagtagtagtcctgtgccaatacatgttccttgtgtgcctgtgcttgatgggccaatatgcatgtaattgtcatctttctattctcctaggcagggctgccagggaatgtttgatatttgtgcactgcccaaaggcaccgtgacagaggcaaatgcaactgaaaaacggtctgcactccacccaccaaatgtatggctgcacgcagagctgcacctcccgagggaaggggacctttttctttggtcagagtgttactggccacaggttcttgggctgtcaatgcgatagaaattgtcatgaggccaaaagagttttctcaacaaggctttattggagcttatgcccttatccctcaggcatgagggaggaagcacgggagagggaggattctctggctgactccttgaaatgagctggtagggatttttttattaagcaaagtgcaggaattgatatcaacatagagaatgtgggctgggctgggtagatcatatgaggggtaggggatgtgggtcagtttatctgctggcgacggttgtcttgagtcatgggccacctagtgttctggttggtggcagcaaggctgtaaatcagttgtttagcattcttccctgagatgaggacatttgcaactttggttggatatgttggatttcctagggccagtttctggaattatttaagtaaaagaattaaacattcttttattcttttaaacattatgagagtgcggaaaaacagtatggctattttctttgcatgactgttaagcaggtatgtcagtgaagtagtggtgtgggttttgtgatcagtgggaatgcatgaaagaatgctatagtggggatgagctgaagccaagtcctgtccctgctgtctcagaagaagacacaagctccagtggctcacgcctgtaatcctagcactttgggaggccgaggtgggcagatcacgaggtcaggagatcgagaccatcctggctaacacagtgaaaccccatctctactaaaaatacaaaaaattagccgggcgtggtggcgggcgcctgtagtcacagctactcgggaggctgaggcaggagaatggtgtgaacccgggaggcgaagcttgcagtgagccaagattgcgccactgcactccaggctgggcgacagagcaagactccgtctcaaaaaaaaaaaaaaaaaaaaagcagacacaagctccccgagcagtgatgcctccacccaagaagacagcttttgctgaattaccctcctgaagaagagtgctttgcctaattcgcataaaggtcctatgtagttgggcctccaaaacttctccaaacattttgtttctattgttttgagaattgtttgcgtttagtttaagagtttttgttttctaggacagtatctgttttctgtgaatatcagaaaagggaagtaatacctgatgtaagtttaagtttttttcttgtgaaatacacaaagataaaatgcacaaaatataaatcataatttcttgaactgtgaggaagtgaaaagtcatgcagtcaccactcccatccagaagaggagcatcaccagctcccacagacccttcctatgactttcccatcatagccctcagtactccctaagataaccattgtcctcaattctccttccagatttttacaaaagtatgcatccgtaagtactatgttagtattgcttgcatttgaattttattacaaatggaataaaaaactatgtaatatttgcagctagctttttttacacggtattgagtcagtgagatttatcctcattgttgcatatagctgtaatttgttcattttcttcaccatttagtaacccattgtaggattataccattatttatccattcgattattgatggagagttgagtcatttctagtttggagctattatgaataacgctgttatgttcttgtgcgtatttcctgaaaaacatatgtgctcattcctgctggatacatgcttaagaatggaattcctgggccatagggtatgcatacaatctagtggatagtgccaaacagatgactgaagtaattgtataatttatgtctctccagcaatttatgagagatttatttctctgcattcacatcaacacttggtattgtcagtctttttactcaaggtcatgtgggtaatgtgtagtactgtctcactgtggttttggtttgcattttcctgttggctggggaggctgaacaccttttcatatgcaaatagataccctctttaaaattggcaattcctactgcattcttaacaatattttgctaaaatttcggaagattccagcaccgtaatactcccttcccaggctgaagcttttgagggaggtggggatggaaaatgaaagaagctagcaagaaaaacccagcctcagccaagatccatcccagatagtaaattagcagggctgggagtctctgtcatgtcagcagtcagatgtcttaaaaccagaatctacccagagtatgtgtatcctgtatctttgccattaccttcttttcactttatgttaaaaaagaaaaagaatcgcagcactttgagaggccgagggggcaggattgtttgcgcccaggagtttgaggctgcagtgagctgagatagcaccactgtagtgcagtgtgggtcagaaaaaagaaaagaaaaacctgtcatgctactgaccaataatagaggctcccaaagtataaactcgcctcagacccttgtttattcttcctgctaccctgtccactctgcctctgccctgtttcaaggatggaccatgccatgaaggaaggcctcttggttacagcctcccccagcccatcagccacgctgccgaggacacgggaaagaataagaagccataagaaccaatagctatgacttcttattctttcctgtgtccttggcagcgtgactgatgggctggggaggctgtaaccaaggggccttccttcatggcagttgaacaatgtgaacacttggacacaggaaggggaacatcacacacgggggcctgttgtggggtggggggaggggggaaggatagcattaggagatatacctaatgtaaatgatgagttaatgggtgcagcacaccaacatggcacatatatacatatgtaacaaacctgcacattgtgcagatgtaccatagaacttaaagtataataaaaatatattaaaagaaaataaataaatatcaagaaggagaaagaaaaaaaaagaataagaagtcagagggaggcagctgcctgcaggaggtttagcgtaaagaaaataggaatggtgatgggaaattgaagaaaacatttaaaaagagctgtcattcaagaatgactccactgatgccgcctgtgctgttccccacctgacagtaatggaccaaggcagctgccagagtgcatatgaaaagacaattcacgttttcagaaggagtggccttctatgatgtaaccttgttgtaatgcagggaagagacagacaataagatgtttccagtcaggatcacaagaacactatttcctgctggagtgatttgtgtgtgtgtgtgtgtgtgtgaacattttggattcgttttcaaaacattttacgtttgatgaaacccaaaactcattttgcctgtagtacttttcattcatcatgaaatctctgtaaaattagaaatatgaccatgtgtctgctttatttacccttcacaaaatatgtctagacctgtttgtctgagacacctcatagtcttgttctctcagaattaggaagccaaaaataactggtgaaaactttttgaaaaccgggaaccatgtgtacttgacttaaaataactttccttttatttcatcaaaatacagcgtgaaaggttatgttacatccctccatatatatatatttttatttcagctttagttatagattcagggggtgagtgggcaggtttgttacaagggtatattgcttgatgctgaggcttgagttatgggtcccgtcacccaggtagtaagcatagtactctgtaggtaggttttcaactcaggccttcttcccttcctcccttgtctagtagtccccagtatctattgttgccatccatgtggctttttttggagacggattttttttttttttttttttttttttttttttgagacagagtctcactctgtcacccagtctggggtgcagtggcacaatctcaggtcactgcaacttccacctcccaggttctagcaattctcctgccttagcctcccaagtagctgggactacaggtgcaccccaccacacctggctaatttttgtatttttagtagagacagggtttcgccatgttggctaggctggtctcgaactcctgacctcaggtgatccgcccaccttgacctcccaaagtgctgggattacaggttcacacctgtaatatacataaagggctactggatacatatacataaaaagggccactgcacctggccctttatatccatatgtactcaacgtttagctcccacttataagtgagatgtggtatttggttttctgttcctgcgttagtttgcttagaatagtggcctccagctgcatccatgtttttgttcttttatatggacatgatttttgttcttttttatggctgtgtatttccatggtgtatatttaccacattttctttatccaacccactgttggtgggtacttaggttgattttatgttttttctactgtgaacagtgctgcaatgaacatacgagtggtagaacgacttatttttctttgggtatatacctagtcatgggattgctgggtcaaatgttctatttttagtaccttgagaaatctccaaactgctttccacaggggctgaactaattttattcccaccagcagtgtataagcatttctttttctccatggcctcgctagcgtctgctattttttggctttttaataatagcctcctggctagtgttagatggtatctcattgtggttttgattcgtatttctttgaagattagggatgttgagcgtgttttcatgtttattgaatgtatatatgtcttcttttgagaggtgactgttcatttcctttgcctattttttaatggggttatttggtttttgcttgtggatttaagttcttatagattctggatattagatgcatagtttgtgaatatttcttcccattctatgggttgtctgttaactctgttgatagcttcttttgctgtgaaggaactctttagtttagttagattccacttgtcaattttttattttgctgcacttgcttttggggacttagccaaaaattctttgctaaggccaatgttgaaaaagttatttcctaggttttcttctaggatttttatagttcgaagtcttatatttaaatctgtaatccattttaagttaatttttatatgtagtgacaggtagaggtctagtttctatcttctgcgtatggtcagccagtcatcccagcagcatttgctgaatagggaattctcttcccattgcttgtttttgtcaaagatcagatgattataggtttgcagctctatttctggatactctaacttgtgtatgtgtctgtttttataccagtgccatgctgttttggttactgtagccttagaatataacatgaactcaggcaatgcgagtctccagctttgatcttcttacttaagattgctttggctattcagactctgttttggttccatatgaattttagaatagttttttctaattctttgaaaaatgacatttgtagtttgataggaataccattgaatctgtaaagtgctttgggcagtatagccatttgaatgatactgatttttccaatccatgagcatggaatgtttctccatttatttgtgtcatagctggtttctttcagcctccttccatatattgttcagctccaggtaatattgtaggtgctgggggccgggcgcggtgactcacgcctgtaatcccagcactttgggaggctgaggcgggtggatcacaaggtcgggagatcgacaccatcctggctaacatggtgaaaccccgtctctactaaaaaatacaaaaaattagccgggcgtggtggcacgcacctgtggtcccagctgctcgggaggctgaggtaggggaatggcgtgaacccgggaggcggagcttgcggtgagccgagatagcgccactgcactccagcctgggcgacagagcaagactccgtctcaaaaaatatatatatatattgtaggtcctggggattccacagtgaatgaaacaggcaacagtccctgctctcatggaacttaaatcctcatggggtctggcagttaactgaaataaaaggtaacatatgtacggtatttgaaggttgtattgccgtggagagaaataaagcagggaaggagggttgggaatgttgggtgaatggtacaatttatacatagtggtcagggagatgacatttgagcacttgctcccctctcttgaagggctttggtgtctgcatgaagctttatttcccaccaaggcctaggtgtggagggtcagagtaaggaggtcattactgtcgttactgtgccaatagaagctgaagtgacacacggtggtcgacccaggtcagcagcactgggaagtgagcatcgcagccagacccacctgccgagctccgggccaactgcctgacatctcgagtggcccaggattgagacccagtgaaaggatgtgagtttgccctcactacgaagtgaggcccagttcactaagctcaaaatggcgctcctaggaggcccttcctcacattctgctcaactcatacacactggtgtctttttggaataagtcactcctggaaaggccctctaaattactctcagtcctcaaatttcatactcctgatgtgtgttggctgttttccaagccaagggcaggcctgactcagataactcctacccctccctttctttcatctgaaagtctagtttaagctcctagttttctgttacgatggagagatttccatttgtaatttccagtaagaattctgaagggacagaaagtcgggagggtaggtgtgacaggaagaattctgaagataacccccatgactctccatggtagaatgtcctcctctttatatgacacagggagatggtctggatatgcccactaatcacaaacccctgtagaagccaagtgatgtctctggcttgtggcagaagttggggaaattcaaagcatgagaaggactctgattgttcttggtggtttgaagagggagggggcacgtgagaaggagccaagaagggccccctggctggcagccagcaggaaacagggactttctagcactaaagcattagtgctgaggtcctggccgtgcccagaaattgccatgtgggtgctctggagttttgaggttgacaactgcaagttgtgtgtagtgccaccgggtcctttgtctcctcctctgtcctgatgccctcagacctcagccaggccagggacgctcagtttgctttgccttctgctttccctcagctgggggatcttgggctggaagtcactctgatgaacatgtggaattcagctctaagtctctcctgagtcctctgttacctcccaggaggcatgatgaggcacagctacccttcacctccatgggtggcatgaagatacttgcaagtatcttttagacgaaaatatataccggtatttactgttacttgaattcctgtttggttcttgcatttcagatcaaaagaaagaagagtttagatagggatttacttgaaaatgtatctgtatctgttccacttttgaaattgtatggcaagaattcagatagcaggcgacacctacactatcattaagggacagatgacgtctttgaaccaggttttaacctgttagctcagacctatatcttcttctcttttggagaaaaaaaaatcagtctttgtgtgtccacactgaattttgctttgaatctggaaagaacacccatgttgcaggcaacttctgttgttctgtctctgagttcccacaaacaagcactaaaatctgcttagccaatagcaagcagcctctaaaatatcaggtcacttggggctctgtttcttatattcttttttgagacagatctcttgaaggctacacgcacaattcaaagaacataaagcctttgatttatttactgccatcagagtggtcctttccctgacttagatgatagagtctcaatagcagatgcgcggcactgtgggcttccactctattgaggccttttctacccactttctctgcttctgtaccgtttctgacacagtggtctgtgaagacattttcagtggcacaggtgttgtcctacaacctgtgacaacagtggagtttgtttgcaaaataaagatgcaaggctttcccatgttgtgggagacacagtcctctcctggtggccgtgtttctggttggttttctctcacgagccagtgtgctgtggggcacccgctcccactcccactctcagtggtgtgtgcatgcccagaggtatgaaacttcaaggaataaaagtggctttctgaacaaaaatatcaaagtgtgtagagacctgtcagactgttcgcacagcagatggggagggacacgttctcccaccttagtctgcacaaacaccgaagaagcagccctgacaagtctaagctgggcacatccccaattccttgggaattttggaaataaaactgagaaagattactctaaaatataaagcccagatgctattggcagccatgtttttgcctctgtgcaaaaaagacttaacccagtaggcctgggacggctctctttagcaaggctgcttgcaaggctggcccttggctggcgtctgggaactgggattacaggagggttcccattgtttccagaactgatgagaggggctcacggtgctgaaactgtttgtgcaaacacatggtatgtgctgaacagcagctttcctttggggagtctggaatgtagtatgtgctgggcagaaggggctggatgctgagtccctagtgagcttccctggttggcagcattttttcttgagatggggtttcagtcttgttgcccaggctggagtgcaatggcaccatctcggctcaccacaacctccgctcccgggttcaagattctcctgcctcagtctcccgagtagctgggattacaggcatgtgccaccacacccagctggtctcaaactcccgacctcaggtgatctgcctgcttcggcctcccaaagtgctgggattacaggtgtgagcccctgcacccggccggttggcagcatttcacacgtgttgtcatggcttgttgccaggggaattaaacatgtccgtgactgctggagagaattcttggaagcacgtgcctggtttcctcgggacttcctgccctgtgccttttccctttgctgatctggctttgtgtcctttcgcagtaataaatctgtgaatagccgtggccatgactccatgctgcgtcctgtgggtccttcccctgatcattgaacacgggctttttattgagccttaaaaaggagtaaggcactgacacaggctgcagtatgaatgttccctgaagacgtgttgccaggtgaaagagctgggtgcaaaatctacatcttgtatgagtccatttataagaaatatccagaataggcaaattcacagaaacagaaagcagatgagcggttgccagaggctgaggagagagggcaatagggactggagtggctgcttagtgggtacagggttttctgttgggtgatgaaaatgttctggaactaggtagtggtgatggttgcacaacattgggaatgtgctaaaagccactgaactatacactttaaactggtttaaaatggtgaaagtgatacattaattttaccttaattttttttaaaaaaaacagtgttatgaacagacacgatagctcatgcctgtaatccagacactttgaggggccaaggcaggaggactgctgagaccaggagttcaacaccagcctgggcaacatagcaaggccctgtctttaccaaaaaaaaaaaaaaaaaaaaaaaaaaaaaaaaaacattagccggctacgatggtgtacacctgtgattccagctattcaggaggctgaagacagagacttacttgagcccagaagttcaaggcctccgtgagctatgatcacaccactgcactccagcctgggcaacagagagagaccctgtctctggggaaaaaaaaaaaaagtgtgccatgatgatgaatatcacttaccatgcatttttatgcttatgctaaatagttgtgaaatagtgccaaatttttgtaaagtaagttcctagaagtgaatttgtttttgcaaaagggtgtgttacactttccattttaatatatattctcaaattgccttcattaaggttatttagtttacacttctctatacagtgtacaagattatacattcccaatactggatacacctactcttttgatctttttcagcctaagaggagaaaatggcatttcttttaatttttcattgcagatgaaggagaagcactttttatcaacttgttagttatttatatctttcttctgtgaattactactacagttgctttgcttgcttttctatttgtatgttcatcttttttcctcaaaatttgtgatagctctttttggttttcttttggtttttatttttatcaaagctctgcatgcccacaatcaggtatgcagagatcctgatgagcaaagcagtcagccggcctgagagctctgcttcctgctccccagagtcaagcattttcaagtcaccttgctgattttttttttgtcatttacctctacgttgctgactagcacgtttatcaactgctatttctagtttttcattttagatgttgtattttgatctcctactgtgaaagatgagggtttatttctttttcactcccaccccccccatgcttcctgtctttgcattctttcatggttgtacatatctggagttcacattaagatgctgtgagtgtcattcatagattagccatgtagtagtatacactgctgcagctttttcttttacacaacctgttacttgccttacacttaaaatcgtcttgtttttgtctgtttacttagttttgtatgtaaatgatactcattcaaccgcaactcttcatgagatatccccacacatcacaagggtcaggggttgcagctgtgttatcctgaggagatctctctggagcctctgacctcttccatcatggctgccctctatgcctggtgcacagagtccctgttagttctttgcctctctcttttttgatcttctgtatcctacatcctattcttttttttcccctttgtttttttttccctttgtttttttttcccttcagtatctccctgagaatgagttcatagatggtaaaattttatgacctcgcatctttgttttaccctgatgcttgatggtttctttaggtataagattttaggtcagaaattattttcattcataattttgtgggcatcgctccattgtcttctatttgccagtgttgcagcaagaaaagaatgattacagtcgtttgtgatttttttttcctctgcaaaagctcataggaggttctggttgtctccaggattctaaaatttcagggtgatgtgccttgctctatagcttaagttttgtgttttctatcatgctaggcactcactgcaccctttcaatatgtaattcatgactttattttctggaattatttcattggtaatttcttctactctgttttctttttctggaaatccccctggcctggccctctaattatcatattctttttttcccctatttctatctctttgcattacagttttgttttctgggaggcttccctaactttaatcttccaaattctattaaatgcttaattttgcatttttttttttgcttttgcatcatttcaattgttttttaattgtgaaatgtacataggataaaatttaccatcttaactatttttaaatgtacagttcagtatcgttgagtatgttctcattattgtgtaaccaatctctagaatgttttcattttgcaaaacttaaattctatacccattaaacactaatctgacattcccctcttcccccagcctctggcagcagccattctactttgtatcactatgaatttaaccactttaggtaccccatataaacggaatcatacagtatttgtccttttgtgtctggcatatttcacttagcatgatgtcctcaaggttcatccatgttatagcatgtgtcaaaatttccttcctttttaagactgaataaaattccgttgattatatttgctatcatatttttaacttctaggatttcttttttattccctgaaattttttatagcatcctgttcttgtttcacagatacaatgttacatatgaatttcactgaggattgtaggttgattttatcaccaaatctctctatgcagattgtttcctacagtccctttattccattggtatctttaggtctctatctttatgctggaggtttgactgctcatgtttaggtggaggctctgcaaagctgaccccctccctggcctgcgtatgaggcctgcgactatgttcctgtggcatatccatgacgaacttctggtgtcagtgtctttaggtggtccttcctcttgggcacatccattctccagagaaaggccttctagtctcctgctggaggacatcaacctggcaaccagaattgtgggacctaatcagaaaagaggcctgtgggccaggcacagtggctcacccctgtagtcccagcactttgggaggccgaggtgggtggattgcttgaggccaggagttcaagaccaggctggccaacatggtgaaacctcatctctactaaaaacattagtggggcatggtggtgcacgcctgtagtcccaactgcttgggaggctgaggcatgagagtctcttgaacctgggaggcggaggcgagatcgtgccactgcattccagcctgggtgacacagcgagactctgtcaaaaaaaaaaaaagaagaggcctgggggtggagagtgactacctcagccctcaccatgtaaattcacttaattcccttgttttcactgcatcactcatgcctccactgctcactgtcctctgggtgtgcacagaagagagaacgtttggagctttggctgctctataaacagatctccaacccattcttcctgtttttaaccaccttcattcccccacctgaagcacctcttgccaccaatttcctgtgtctttgagggattttgcaccataaatcaggttgggtctttgcccttcgccactgctggcctgggatttagtttgcttcggtctgttatgttagttatctcttgtccattgacttttcagctgccaatgttttgtctttttgctttctttcatgttccctttttccttgtctgttaatgcctttggaggaaaaattcctttctgtggttttctggggcttcacgagggggtgagattgtgaatgcatgcgtttcattgccatcagcctggaggcctcagagagctttattcctttctccttaaggatattaaccattatctgtcatagaggttccaagtaccctttacatatatactatattatatacaaatacacacacccttttgttccttctggagtgcatttgtgtttgttaggtcaagttttatttttcccccagatggatggctatttatttcagcatcacttatttcatcatctctcttgaactaactgataggcctaggtatgaatgggaactgagtggtgtctggacttgctgttcccttctgtgcctctgtgggtctggcctctgccacaggttgctgccgagcagagaaatgagagcaggacctgagtgcggcacagcgccctgggcctcagccagggtcctgtgagtgtcagtcagtgctgtggcatgcgttgttttgatgaatttaatgccctggcatttttcattatttgattatacttgttggttttctaggtaaactattacacataacaatagttttgtttcctttttttcttttttcttttttttttttttttttgagaggtagtctcaaaaaagtctcggctcactgcaatctccgcctcccaggttcaagtgattctcctgcctcagcctccctagtagctgggattacaagcacgtgccaccacacctggctaattttttgtgtttttagtagagacgaggtttcaccacattagccaggatggtcttgatctcctgaccttgtgatccacctgccttggcttcccaaagtgctaggattacacacatgagccactgtgcccagccttgtttcttctaatatttatacctcttgtactttttttggtttattgcattcatgaaagtccaggtcactgttgaataatgctattgatggtggatattcttgttttattttctgttcgtaataacagaaataagatttaataatattattaaataatttaataataatttaataatcacctaaatgagattcttgtattgttttgtgataaatactctatcaactaaaggaagcttgcatctgttttgagcttaccgggggatgttttaagtccagaaataggtaagaattatatcaaattcctttttagcttttaatgagctatccatatggtttcttctcttttgacccatttatgtaattaataacataaatacatttactagtaggggaacatttgtacatatctgggggcaaaattccaacttggtcatggtatactattcctgaaggaaactctacttgattgtggttattctttaatgtgaaatatacgattttttatactcagttattgatgagacatttggcttcttgttggttgctttggtataaatgaagttttgtctcaataaggcctgtttttgtttttgttatgatgttagtgagctctaaaaccctgtatcatctgtatatagtaaaaagtgcaataggtatttattttaccaccttctgtagtaggattaatgacagaattaattcttagccaaagagaatgttttatactctagttgcaaagttctgtccagtctgacaaatgaaaacctgaaaaccccaaaaatgttgttgggtagaagttgggaaacctttcatttaagcttcagacaatttttgtgaaaagtataagagtgaagacttaacatttttcctggaactgatgctcttttgttttgatgaaagtcctctgaaaggacttgttagttgcatagaggtaaggctaggcccctgcctattctcagggctcaaggcctgagcagccgaaggcccatcagtggtcccagttacctcagtgggagctcaagtgtcccctgtccccatgtggccacttgatctgctggattctgagtcaggtgtgttgaaatctcttactctgactgtggtttgtgtcaaaagctttgattgctgagagattatgttccagatattttgaaccatacgtaaaggtttcttgttctatcttcttggtggtttttaccttttacttcagttaatccttttgatctagaagcttacattttatataccaatattgctatttccatttatgttttctgtgcattttatgttttgcatttatgttatttgcatgatatatctttgtactttctttcctttcttctctttttttcccccagagttggagtcttgctctgttgcccaggctagagtgtagtggcacaatcatagctcactgcagcctccacctcctgggctcaagcaatcctcttttcttagcctcctaagtagctgggtctacaggtacatgacaccacacctggctaattctttaaaaaatttttttagagacagggtgttgctatgttgcccaggctgattttgaactcctgggctgaagagatcctcccacattagtctccccacttagctgggattacaagtgtggagccactttgcccagctcctttattttcagcctttcttagttggttgtttcagggttatgtcttataaatagtttggctttacatgtaatctgaaaattcctctaacagggcagcttagcctgttcacattttcttgtggctgtatgtgttttatcttcttcctctgtctcactttctatttttagtagacttctcttgctggcttccttcttactgattcccaggcacctagcagcgtggtaaggtgtgtgagttgaagaggtggaaaaacccaggcctgagactctgaggggtaaccacagtggaataatcataaagtttaaagctagagtctgtttttgttaaactggagcagaatcataaatcaaacacattttaaaaaatgcagagctacagagccggctgcattagtgagaaacagccccgtcggcccctttggggtcagaagtcagaattggaggcagggcctgggcccagttgctcttgccagggctgctttctggggtagaatggaggaagagccatgggcaagggccaagtccactggccactgtcaccaggggagcagcccgaagtcagggccgtacctgggaacaagaaggactccaaagacctggagcagatctggagcactgtgagttggaggagtcgggctcggatagcagcctgcaagggtgagggtgctgagaaagcaagatggacagagagggacagatgtggcccattcagggatccagaccagtgtctcatggcatctgatgtctagtcaccagcatgcatggggacatgcctggacacttgggctgatgcttctgcatgactgagcctcacggtagcagggtgcccctggacagaaacaaccacatgaccaagcagaactccttagcagccatttaaaaggataactggaaactctccaacctaattgggtaagatggcttaccaatttgctaagtagggcatatgcttaaagtactttttaaactttttttttaaaatgatgctgctaaatgaaagtatgtttaatttcacagggaggatctgtttttgccaaatgaagttcacttagctccttttattggtgctttggggaagagggggtgtggtctgtccctttagccttatagttcttgatctggtttttctttttttcttttttattgtaaaatacacataacatgaaatttatcattttaactattttaagtgtacagttcaggggcatgaagcacgttcacatggttgtgcaaccatcactgctttctatttccgaaatgttttcatcatcccaaactgagctctgtatgctttaaacacggggtaggggactccatattccccgccctcagcgcctaaccaccgttccgcttcgtctctgaatttacccattctagccaccttgtagacgtggacttacacagaatgtgccctttgatgaggggctgatttcactcagcacagcgtcctcaggcccacttatgttgtggcgtgtgtcagccacgctgcttctgcatccatctgtccaccttctcctctccatagtccccaccccatcctgggtcaggagttgtgatttttccttgtgtcttccagaaccaaagctgggagatcgcctgctaccatggcttgaaaacccttaacgactctgcagccagcagagttggacccatattcctggcctgtgtgaaagaccggctttttttaatgggactatttagctgtattatttgtcctcccttttctcagaggtatggaacatagctcccctccccaccctcaccacacctacctgaaaaacgggaagattagatccaccatgtccttaaggaaaagaagagagtgttttgattgccaacaatttgggctccaggcttctgtaagtcatcaaggtccatattggagaattagaagcaagagggtaacagaggcagaggataagagcagaggcttaggttgagggagagcagaggccagcgcccttggatgtggtggccgggggctgagaggtggaactgggaagactggaaactcagccaccctacaggctaagggcccacatcctccctcttctgacctgccaaattcctacaacatgcaggagaaagtgagggaactaataaggtgagcttattaatctggttaaaggttcttggctgggcacagtagctcacacctgtaatgtcaacactttggaaggttgatgcaggaagatcacttgagtatagaagtttgaggctgcagtgagctatgattgtgtcactgcattccagcctgggtgacagagtgagaccctgtctctctctctctctctctctttttttttttaaaggttcttaccatgagttagcctcgtcttctgacttcccagggtcatttgaaggaagcatctgcatcaaaactgccaatttacactttaaaattttttatataaatgttagatgttttgccagcttcaggaaggaaaaacaggattttcaaaataaaatgttataagaatgtgtcatcctcctggggactgagggtgatttaagtcccttggtcttctttcctcccatgggctgtttgtccccagctgagggcctccatgggtcaagtatgccagcagctgctgctgcagcataacactgcccaacaccaaagccatcatcttgtcaccattcagaaaaaggaggccttgatttttgctgctgttccttctccatcccccaggacagcatgtgagtctatttagataatcacagtcccaggtgaatctgcactgagcattttttccattctcttactcgtgaaatgttcatttgggaaaaagaagtaatttcatggcaagacacttatgatttcacaggctgaattcagtctttctgagggtagaaggttaacggagttgaaggttacttttctttctttttttttttttcttttttttttttttctgagatggagtttctcccttgttgcccaggctggagtgcaatggtgcgatctcagctcactgcaacctctgccccctgggttcaagcgattctcctgcctcagcctcccgagtagctgggattgcaggcatgcgccaccatgcccggctaattttgtatttttagtagagaaagggtttctccatgttggtcaggctgatcttgaactcccgacctcaggtgatccgcctgccttggcctcccaaagtgttgggattacaggtatgagccaccgcgcccagccttgaaggttacttttctagtataaactaaacttgatcttggaacaaaattccttataatcaatttttcagttattgcatattattttcttagtacaattctaattctgctgactacagagtcagaaagggtttaaaaaccatggtgacaggtggtctcccagccagagctgtggttttggaagacatgaggaagaccacaactcctgaactaggatgggggttgggatatggagaggagaaggtggacagatggatgcagaagcagagtggctgacacacgctgcaacacagatgggtctgaggatgcttcagtgagtgaaatcagcccatcaccaaagggcacgtgctgtgtggtggaggaacatagtcgcatgtgtgttgttgggaggtggagtttaaggtggaagaacctctttgagggcaatttggcagaatccatcaaaatggattccacctgtgtgcagagaggtgcatgggaggacaattatcgcagtactgtttgtgataacagaaaactggaaacaacctaaacgggctgctgtctccatccatgtgatggacctgcatgtgtcgtcagagaacaaagtagcgaatggtgatggaagtaaagctagcagtgacaaaatatttaccacgtgaccgacattgtctaagtgcatctaatcttgaccacaatctcatgagttaggcattttgtatccattttacaaatacaaaactaaggcagcaagaggctccatgactgctcagagtcacaccctagtaagggatagagctgggactgaactcctgctgttgggcccagcatccagtcccttggtctctacactgaaactgttcatccagatgtcgtgaaggacctagctctatatatcttggtaagggtgcagaacatgccaccatctgcataaaagggggaaatacacatgcatgtttgcataagtgcaagacagcactgtcctgtagaaccctctgtgatgatgggaatgttctatatctgtgctggccaatcctgtagccacaggtggctgctgagcacttaaaagattcctaatgtgactgagaaatggaattttgatattatttaattttaactaatttaaacagccacatggggctggtggctgtcgtatggggcaatgcaaggtagaatatagacagatggatgttaaagaaaagatcaccggattttgtggtttgcaatccctacttttaaaaaaccttctgcagaagcatcattggaagaacgggtttcataactgtttatttcagaaccactaatttaatctagccacttcatttgagagatgaggaaacttaaggcagaaaagttgagtcactttcctaaagtcatattcagctgcgttagtgtgaggaggaaggagcgggtcacagtttggtttggtttgttcctctttagagcatcggacattctcgtttgccaggggcttcattcaatctgatgtcagctcagttcttagcatggccggtcggttcctggaaatggcggctttgggtgaaaccatgtgctgtaagccatgggaactcaactctggcccatgtcaattagcctgcggtgaaactggttttgttatacagcgtgtcaccatttcacttaatgttacagtgtccaagaacctcccaacattaagtgaggacttactataaaagaaagaaagaaccagacttttgtctcctgggctcccagaactccatgaggaatcttgcagtggctcgccctttcctgaagccccagagttcatcctgcctcctgcacaccccaggctcaggctgtcctgcctgcctgcaccacagcatgggtgaaccatggtaggaccatgcttccctgcggtgtactcctcagcgcctcacacatggagggctttggaaatgtttgtgtggactctactcccagcctcgagggctgaaccgctagtgagttgtgcagatggctcatgaggagatttctccaacatttccttgagggagctgctggacacaggtaaacactcagcaaggagcagaatggggcttcagggggctgctagtccactgagcctgggtgactccaggaggagaggagccagcagagctatgcatgaccatgaccttttttagaagcagcaagcaaggaggaagagtggaattaatgaaaatgaggtagccaacttaacagaaaggcagaagaggaaagaaaattccagggaagtgtttccccagaggcctgagcatggtcctaggggtcagaagatggcagggaatcatctgggatccgaggtgagggcacagagaagacctgttctcaggacgccaaggaagaactgggaggcccctgctgagccgcggggcttcgcctgcgttcgggtgctgtgtgaggctagcactgccagtggaactgctgttgggctggaggaagtggacccagccagggggcaggaggtgttggccgcaggcccatgcttgcaaggcaaccagaccctgtgtcacaatgccaaagccagttaacctcggggaagaaacgccgtgggtggggacttctgagtgtttgtcaagtgaaaatggaggaagcaagaaagacagggccccagctgctcctgagatgtgtatcttctgtgattctgtctccagggagggactgtgcagcatctgcctgaacatctctgggacacagccgtcctctcgccataggaaggctcttgtccacagaggagtaaagggaagggcgctgcttcctgcaccagctcaccgtggccgctgtctccattttcgcagtctcaaaccctcggtgctttcagtgtggataaaagagtgggaggaacatttaaaaagtgaattattccaaattagtctctaaatttaatgcaattccgattaaaatcccaacagactttctttattcttgaacttaacaaagtaattaaaaattcacctggaagaataagcaactaagaagagccaaaaaagtttagagaaagagtgctgatgaaagtgggttgccctgcctgactggaaaggtgcaatgaagccacggcagaggagacccccttcacacgtcattctgcccaccgtagcgttgcagaagcaaagacacagtggaaacagccatgagcatggcccctgcagctcatgtttcagaatagtaatgacactgacttgaacgggttgaggaggtctgcatttttttaaatcttaaaagataagtagaagttgtcagatttgatttgggagataatgagccatataaaatctaaagtagaaaaataaataattggctgggtgcgtgcagtggctcacgcctgtaatcccagcactttcagaggctgaggcaggaggattgcttgacctcgggagttcaagaccagcctgggcaacatagtgagaccccatctctaagaaaagatgaaaaaaaaaattagccaggcatggtggcttccacctgtagtcccagctactctggaggctgaggtgggaggatcacttgagcacaggagattgaggctacagtgagccctgatcacactattgcactccaacctgggcagcagagccagaccctatcttagaaaaacaaacaaacaaaaaagattaaagcaataatatgaacaggagcagaaatggaaaggcattccaaggaatcccagagttattccatgagggacaaaaggtagctttccgctgccagagatgtgacttgccctttgcagcaaatataaaagaagtcacttcaggcattctgattgtctgtagctgtagagcaaaccaccccgaaacagtggattacaataacatcttcattaaccttatgaattaaatgtctttaatttttgccagtttgatgagtgaaaatgatattttaccgtttttattttctggtgagactgaacatcttttcatacatttcagactatttgtatttcctcttcagtacattacaggttcatttctctgccaatttttacttgagttgtttgtctttttctttgagacagagtcttgctctgtcaccctggctggagtgtagtggcacgatcttggctcacctcaacctctgcctcctgagctcaagcagtcctcccacctcagcctcccaagtagctgggactacagctgcatgccaccacatttggctaatttttgtatttttttggtagagatgaggtttcgccatgtttcccagactgttctcaaacccctggcctcgagcgatccacttgcctcaacctctcaaagtgctaggattataggcatgagctaccatgtctgtcctctttcttattgattacaggaatatattttgagtattagtcgtttgctatacatatattggttttaattttgtcatatagaaactttctttaagtcagatttcttaatcctttcctttatactttttgcattttgtgccttagatggctttctttccccaggattataagcctattcttctatatttttctttttataatgttataattttggtttttaagcttagccatctggaactcatctctaggaaacaagcgatgcgagactaatccctgggagaagggaaactcctgcagtgatggccagctcaccagctctctgcctgggaacaatatccacttcccagtgcagggagctggcctctgagcagagcacagcagccccactggctgaggaggcggtgatcagagaggggcagccaaagctgcacattttatggaatggggcatcagaaaggaggatgctgtgaagatagggggcccaggagtctatgtgcaggtctccacaagtcatggccaagggttgtgctgtccgtgtgcaggacgaggccactcgaggtttaccagatagtctgagatcagaacagaggtactaaaactggatgtgtgtgtacacttgtcccaggcaaggaccgaacactgaatgcacggcagggaaggagcacaggctgcatttgctgagatttcacatgaaatgttatgtgtgcatttgctttgtatcctctctgaccagaccttcaaagtaagtgtgatcctccctgggcttttattgcacatgctgagctccagtgaggaatgagctgcttttatcctctgtgatctgtaaactgttaaactttccaaaaactaaaaactcaatctgattccacagctgtgataataaagaccaattgggaaaaccccagagagattcagggagtgagactgtttagatcaccatgagcctgagacagctggttcctgcaagaatgaatgtacagcattttctaatcagtctcctgcctttttcccaagaagctttgcttttttctttttgacttttgcagttagtgtacacagagtcagttcattcacagacacctcatggaggcacctggaggtccttggtgaaggtaaagaagtactgggaatgcagccacggaatccagctgtgtcctcgattgaatttagcacagtacacaattcagtgtgtaccctgcagcttgtccccccagtgattgatgttttttaccaaatgttaataaccaaggcaaggcaagtaaccaggcaaccaaggcaagcgaaagcatcttctagaagcaaatgcgcaggctgtgtggttttgctttgccctgtcctgctgcgttattcatgagtgctgtctctacattcccccgtctgcaactttagtacaacctcaacactctgggaagatattcttggatatgcactaaaattagatttttaccttcccatgtgtaattcaatgtcttcatttttctcaaatgacttttgcttcattgaggtggacaaaattctgtatcttactttttttttttcctaaaccctcctagagacctataaccagttttggagatggttggactgttacccttttattaaacatctaagactttcatcaaaaagttccatattccactcagaaatattgctaaagtatttatatcctgggaaaagttaatttgtaattagtaactagcatttccctgggtaaaaataatcagcaagtttctttctgtttttgctccactttttcctccccaaaaatcttgtacataaattccaaatgttagtgttcagagtggacaccacactctagccccttaagacaatcagggtccttccctccttgtttccttcttccctccccctccctgtcctccctccttctctctccccttccctccctccctttctttcttccttccttcctttttttttttttgatagggtctcgctctaccacccaggttggagtgaagtgatttgatcatggctcactgcagccccagtctccccaggctcaagtgattctcctgcctcagccttcccagtagctgggattataggcatgcactatcatgcctggctaatttttacattttttgtagagacagggtcccgccatgttgcccaggctagtcttgagctcttgggcttaagcacctcctgcctcggcctcccaaagtgctgggatttgtgagccatcgcacatgacctcctttttaattgaggtataacatacacatgtgcatgggggatgctcacgaggtgacccaggtctagaaagcacagcattcagccccccagaatcctcttcatgttcccctggttaccagcttccactcaaggataacaatgatcctagtccgttttattcagggatgaatatcaaggaaaataccagaaggtaacagcctacagaatgcctgctgggctgcttttcattttcttctcatggttcttttgatgaacctctgagtctcagatgagtggtccttgggaaaagaccttaccatactaacatccctggggtggtctgtgtttcttcttagttttggctgcttctgtgagcattgaggactgtcgcgcagcagctcagccagatttcacccctctctactttaaggcctgtgccagctctagtcatcccctcgccaaaaatgagacttttcacctccatccaggggtaggtcctggagtgagttctcagcttgctccctggggtgcctaggacttgcccggccacccatgtcccacaaactgctgtttttctgcctggtgcccagtatattggccctgcccacacgagtaccttgctgccatggcttccttgacctctctggtcactgcagtgggactggatcttaacccacctacctgggacccacagaccttgcctagctcctggctgcccagggctggatgcttttccagtccaggaaaccagcccccaagagactggtgaatgatggcatgatcccatcgctgctgcctgcctcttccctccaacccccacgaactggcccccagggcccaggctgcaggagctcctggaaactgtgctagccccaagaaagtcctggctcctggaggactgatccccttgcactccttaggccatcggctgccgtcagcagcctcccctgcctcccctgggctctgctgatgagggtgcaacacactgcatagctcatagcctctgtacgtggtctgcaagggaacagtaatttaaatgacatggctttggccgggcgcgggtgctcacgcctgtaatcccagcactttgggaggccgaggcgggtggatcatgaggtcaggatatcgagaccatcctggctaacaaggtgaaaccccgtctctacgaaaaatacaaaaaattagccgggcgcggtggcgggcgcctgtagtcccagctactcgggaggctgaggcaggagaatggcgtgaacccgggaagcggagcttgcagtgagccgagattgcgccactgcagtccgcagtccggcctgggcgacagagcgagactccgtctcaaaaaaaaaaaaaaaaaaaaaaaaaaaaaaaatgacatggctttgaatgaactgagagctctgataaagcataactcaattcatctcttttctgcaagtcatcttccatccatgtggaaagtgtgaatgataccagttgtgccacattgatactgaccccctcgttcctgaaaatacaccttagagctcatgaaagcacaccccagttactggaaaggaagccacttttgttgtaagcacagcagcagagcagcctctgaggtgcacagggctctgcaggttgctgcttggccttatgtctgagtaaggcctaagtacacatagctttttttttttgttttatttctgagaaatttaattattttagttctttttttaaatcaacttttattttaaaatttcagggtacatgtgcaggatgtgcaggtttgttacataggtgtgccatggtggtttgctgcatagatcaacccatcacctaggtattaagctcaacatacattagtgattcttcctgatgctctccctcccccacccccaataggccttagtgtatgttgtttctctccatgtgtccatgtgttctcatttgttcaccttccacttataaatgagaacatactttgtttggttttctgtttctgtactagtttgctgaggaaaggggcttccagctccatccatgtccctgcaaaggacatgatcttgtttttttatggctgcatagtatggtgtatatgtaccacattttctttattcagtctatcactgatgggcatttgggttgattccttgactgtgctattgtgaatggtgctgcagtggacataacgtgtgcatgtatctttataatagaaggatttatattcatttgggtatataaccactaataggattgctgggtcaaatggtttttcttctagatctttgaggactacaaggaacttaaacaaatttagaagaaaaaaaaacaacatccccattaaaaagtgggcaaaggacatgaacagacacttctcaaaagaagacatttatgtagccaacaaatatatgaaaaaaacctcaacatcactgatcattagagaaatgtaaagcaaaatcacagtgagataccatgtcacaccagccagaatggcgattattaaaaagtcaagaaacaacagatgctggcgaggttgcagagaaaaatgaacacttttttttcttttttgagacggtatattagtccattatcatgctgttgataaagacatacctgagactgggaagaaaaagaggattaattggacttacagtttcacattgctggggaggcctcagaatcatggcaggaggtgaagggcacttctttttttttttttttttttttttttgtcccaagacggagtctcactctgttgcccaggctggagtgcagtggtgcgatctcggctaactgcaacctccgcccccccgggttcaagtgattctcctgcctcagcctcctgagtagctgggattacaggcgcctgccaccgtgcccggctaatttttgtatttttagtagagatgggatttcaccatcttggccaggctagtcttgaactcctgacctcgtgatccacccatctcagcctcccaaagtgctgggattataggcatgagccgccgtgcctggctgaaaggcacttcttacatggtggtggtggcaagagaaaaagaggacagaagcaaaagtggaaacccctgataaactcatgagatgttgtgagacttattcactatcacgagaatagcatgggaaagactggcccccatgattcagttacctccccctgggtccctcccacaacacttgagaattctgggaaatacaattcaagttgagatttgggtggggacacagccagaccatatcagatggagtcttgctctgatgtccaggctagagggcaggggcgccatctaggctcagtgcaacctctgcctcctgggttcaagtgattctcctgcctcagcctcccaagtagctggtactataggtgcacaccaccatgcctggctaattttttgtatttttagtagagatggggtttcaccatgttggccaggctggtctcaaactcctggcctcaagtgatccatccgcctaggcctcccaaaaagtgctgggattaacaagcgtgagctactgtgcctggccaaaaagggaacacttttatactgttggtgggaatgtaaattagttcagccgttgtggatgacagtgcacacggctttgaattgtcccccagctgcactggactgggagttgctggtgctcctgatgctcagctagaattagagataattttagatggcaactaggggactcggttggggttgttccactctgagatgaaagggaacgtctttatttaggagtataatgttcttggagcgagtgttatgtcacaaaccatagttgggtggcctctacctctgccaacgtcagcaataaaaagtctgaggcagggaaactttttagagagaagaagagtgtttcctgatcatgggcttgggcttgtctacctgactagatttggacttttataataattcttttttaagatggtacacattctcctttttcctgtgttgtttctctgtggtctcactgctgcagtgccaggatctgcattcaaatacggccgagcccccagagcaccaccagtgcagtctgtcctgaggcactggactctcagagctctcctgcgggtttcagtcattttgtttggtttttcaaccatggctttgatcttgccagactttagtctcaacctgtgacccatttatagttacagatcaagaactagtggtcactttggcaacatacataccaacatggaaatgatacagagaagactggcagggaccctacacaaggaaaacaaaaaaataacttttttttttttttttaaagagagtctcactctgtcacccaggctggtgtgatcatggctcactgccaccttgaatgccagggctccagtgagtctcccacctcagcttcccaagtagctgcaactacagacatgcaccaccacacttgtctgatttttatttttatgtattttatatttatttttttgagacagggtttcactctgttgccctggctggagtgtagtggcatgatctctgctcactgaaacctctgcctcctgagttcaagcaattctccctcttcagcctcctgaatagctgggattacaggcacacaccaccatgcctggctaatttttaaatttttttggtagacgtgaggtttcaccatgttgcccaggctggtctcgaactcctaacctcaagtgatctgcccaccttggcctcccaaagttctgggccaccactctgagcccaaaaactattcttgacagtgttcaatgaactagcatatgggcgccttcttggttgtgggagatggtggcattgttgagcttccggatccatctgacctctcaaatgcttctgaagattttgcagatgaagaaaaatgctgttttgtatcagaaatgatagaagatgtaagtgtgtatataatgttctcatgtttttggaaaagaaggatttagcaagtgttaaagtgaatttgggaagggagcgaggaagggtgagaaggagaacctggcccgtttggatgcacaagttccttggggcggtagcattcaccagtgcagagagcagtgccatccaccccagagtctgttcctggtgggcctggcctggcctcagaaaatggggttctagtttctttaactgacaagaaggaatcaaagtttcaccactcactcctctagaatctgccctctcccaccctcagcctttcctttcactcttgtcgaagacatgaattgagcaagctgcagggcctctttcagcagggtctgctggcagtgtccactgcaaatgggacatgtgcttcagaggcaaatggagctggcgttctggccctgactctggcgctagaaatatttctttttgttctggctttcttatctgtaaaatgggtataacactagtcaccgtgcatggctgtaaatgagaaaatgcacagtgacaggcttatcacaggcactcagcaaatgccactgcccttcccagcccaccattttttttttaaaagacggttttgctctgtcatgcaggcgggagtgcagtggcatgatcttggctcactgcaagctccgcatcctgggctcaaacgatcttcctgcttcagcctcccaagtagctggaactacaggcatgtgccaccacacccagctaatttttgtatttttagtagagatgggatttcaccatgttggcctgtccggtctcaaacccctgagctcaagtgatctgcctgcattggcctcccaaagttctggggttacagcgtgagctaccgcacccagccaagggactcatacttaaaggactttggtcttgctcattgagcatttggttttctatttaaaatgtggtctttctgttggaaacgatctagtatccgtcagcattgctcttgggaaagaacacttccaggcagggcaagcacttgccttgtgtacacagatgccttgagatcagcataatgtaaacgtcaaaacgggtttctggatctaaagcctggcttgctttcttccaggtcagcagtgcaagagatgggtttggagatagggtcgcagccagcctgtgcgtggcagaggaaggaagggggagctgagtactggcaggggccacagtgctctctgcccttcccaagaggaaagcagaaaccagaccctctgttagaggccctccttgttttcaccttcccagggtttgatgtccataacatctggtttgaatgattccagcgaactggatggggcaccccactgccccaccaccgcctgttttttcatctttttttttgggggggggacggagttaatctctgcaccccagctggagtgcagtggcgctatctcagctgactgcaacctccacctcccaggttcaagcaattctcctgcctcagcctcctgagtagcggggattacaggtaccagccaccacgcccagctaattttgtatttttagtagagttgaggtttcactacattggccaggctggtctcgaactcctgacgtcaggtgatccgctcacctcagcctctgtaacctacaaacctcttcagaaagtgtaaaatgaaagcatttccccatttctaaagcagtgtccaggtttcatcaggtagctgtcgaacccaaagagactttgaagccaagagtccacaggatcagcttcccagtggccccagaagttacaagatggggccctcccaacaaaaggcatcctcaggcttttacgtaatgctggtgtgcttagcgactgctgaaagttgactgtgcttgtgtcgtgaaagccaagatgaagagacgttattatggttgtgtgttgctttcagctagatactcctcgctggggaaatgtaactgcaaagcagactccaggacactgtcttcctgaaagccggtgcttttgggggacattctggggcccaccagggtcatcctggatgctgactggaactgagaagaggtttgctgggaagatagggacagattctttgtatctatgtcattcaggtaaaccctacatgtgacatgtgacaccatctcttttgacctcagtttcaaatgagatatttgaccaaccttattgctaagggtcaggctagcttgaaataaccctcaagaaatctagataaaaacctaaatgagattataggctttttttttttgcctaagattatttgcttccagaaccctaaggaaacttcacaggaaacatggtaccatattttagtacacatctccatcctatgcatgttctccagaacctcttcacacacactttgaggagagttccatcaaacctccttctcttattccatcttaatgtcatgcattatttctcttcatcctgcctctccttttcagttacaaattgattctgatagaaacaccctaaatgaccttcccagggcagtcagagagttaacttgttgtagggttgcatttggccatctgggcagagggaggaaacagtggtcagtgtccaccctgtgggagggaggcagcacccaccacagctttccaactttgctggcttcacatttcccaggacagggcaagaagaggaagagctcctcagtggctgtggggagagtgcaggaaggagccctagacttgcccatttcttcttgtcccaaaacccaacacagacctaaaactcagccaagcccaagctatgccccgcttctgcaatctcttgcaaggcccctgcttaaacaacctgagctcccagctttagtaggcttgggaacttgatgcttcatttgggacaaactttgtggatccagggaagaaaaccttgttggggtgagcaggtggccgacaggactgaggatctaagaggtggggatgcactggagtccccagctggcctaggggaccggtacaggagtcttcagaagccaccatctcgatgggcagggacttagaattgaattttttttgtttttgttttttttgagacagaatgtcacctaggctggagtgcagtggtgcaatctcagctcactgcaacctctgccttccaggttcaaggcatttgcctgcctcagcctcccaagtagctgggattacaggtgcccaccaccacacctggctcatttttgtatttttagtagagacggggtttaaccatgttggctaagctggtctcaaactcttgacctcaggtgatccacttgcctcggccttccaaagtgttgggaatagaggcgtgagccaccatgcccagctagagttggattttagtttccttatcactgtgtaccaagcagctgctgggggctgcacccatcccgatggaggagcttctttctccccatgcagcctcatgctccctgcttgtttggtgtgctgacggggctgctgaacaggacgggttttcttttccccctgagaagcctcctacattgtggggagaagagtgtggtaggaagagcaatccagagacagtcttgtaggtctttaagaccttctcatcttggtctgcttgttgcgaattggggttatacagagatggtgatggtggtagtgatgacggtggtggggatgatggtcatggttatgaaggtaatgacgacggtggtggggatgatggtcatggttatgaaggtactgatgatggtggtggggatgatggtcatggttatgaaggtactgatgatggtggtggtggtagtgattcctccttgaccaaataagtctgggaaatgctggcatgtacaaaactaatcaggtgggttaatttgagaataagatatctttgagcctttaatgactctcctgagggatggacagaaatcctctactgttttgagcactgaaggcttttcctcaatactattctgtgaatggatttgggcaacaccaggccattcctggtaccaaaacaaaatgtactctgagcaaatttgggaagtttattcttatgttgccttactgaaaaatccaaaggtagattcccatctattattattattattattattatactttaagttctggggtacatgtgcacaatgtgcaggtttgttacataagtatacatgtgccatgttggtgtcctgcacccattaactcatcatttacattaggtatatctcctaatgctatccctcccccctccccccaccccatgacaggccccggtgtgtgttgttccctaccctgtggccaagtgttctcattgtttagttcccacctatgagtgagaacatgcagtgtttggttttctgtccttgtgatagtttactcagtatgatggtttccagcttcatccatgtccctacaaaggacatgaactcatcctttttatggctgtatagtattcgatggtgtacatgtgccacattttcttaatccagtctatcattgatggacatttgggttggttccaggtctttgctatagtgattagtgccgcaataaacatatgtgtgcatgtgtctttatagcagcgtgatttataatcttttggatatatgcccagtaatgggatggctgggtcaaatggtatttctagttctagatccttgaggaatcaccacactgtcttccacaatggttgaactagtttacagtcccaccaacagtgtaaaagtgttcctatttctcaacatcttctccagcacctgttatttcctgactttttaatgatcaccattctaactggtgtgagatggtatctcattgaggttttgatttgcatttctctgatggccagtgatgatgagcattgtttcatgtgtctgttggcagcataaatgtcttcttttgagcagtttctgttcatatcctttgcccactttttgatggggttgtttgattttttcttgtaaatttgtttaagttctttgtaggttctggatattagccctttgccagatgggtagattataaaaattttctcccattctgtaggttgcctgttcactctgatggcagtttcttttgctgtgcagaaactctttagtttaattagatctcatttgtctattttggcttttgttgccattgcttttggtgttttagacatgaagtccttgcccatgcctatgtcctgaatggtattgcctaggttttcttctagggtttttatggttttaggtctaacatttaagtctttaatccatcttgaattaatttttgtctaaggtgtaaggaagggatccagtttcagctttctacatatggctagccagttttcccagcaccatttattaaatagggaatcctttccccgttgcttgtttttgtcaggtttgtcaaagatcagatggttgtagatgtgtggtattatttccgagggctctatgctgttccattggtctacatctctgttttggtaccagtaccatgctgttttggttgctgtagccttggagtatagtttgaagtcaggtagcgtgatgcctccagctttgtgctttttgcttaggattgtcttggcaatgcaggctcatttttggttccatatgaactttaaagtagttttttccaattctgtgaagaaagtcattggtagcttgatggggatggcattgaatctataaattaccttgggtagtatggccattttcatgatattgattcttcctatccatgagcatggaatgttcttccatttgtttgtgtcctcttttatttcgttgagcagttgtttgtagttctccttgaagaggtccttcacatcccttgtaagttggattcctaggtattttactctctttgtagcatttgtgaatgagagttcactcgtgaattcggctctctgtctgttattggtgtataggaatgcttgtgatttttgcacattgattttgtgtagattcccatcttatcacaatcttcctcatctgtgatactgcacagtttgcaatagttcttgtttattactacttttctctcctgcagaacattgacatcaccaatttcagcagcagctggagcgatggcctggccttctgtgctctgctccacacctacctgcctgcccacatcccctaccaggagctgaatagtcaggagaaagtaagtcatggccctgtcaccttggttatcctctaagaaatgcaggagtcctaattgataaaccccactgtgggagggggcttacaggcctgaagtagaagttgggatattgataccaggtacagataactcctgaatgtttgactgcaccgtggaatcccatcctcagcaaatcttcctcagtttcccttctcaggaatctcagcttcatggtttcaagaccttggccagcatttttcaaagcctattccaaagaaccagcaagcaccaacaaaaagaattccctgttcaaataagtcttggacactgtatattgcatcacattttcagagagcatggtgcctgttaacacattaaagacttcaagaagtcctacattaagaaatctatgtgactgtttaacacagcatagatcagatccacttaacctctttacttatatttgtttgttttactacaatcacacaacaagggttggcaaattttccctgttaagggccacgtaatagactcagtgggtcaggtggtccagtcacaactgttcaactctaccatcgggctaaagaggccattgatcactttgtaaatgaatgtgcatggctgtgtcccaacaaacctttatttacaaaaacaggctatgagccagatttgggacagcagtttgccaacccctgacctagaacctcctacaaaatgtcccacagagcatactttggaaaatactgtgctgggtcccgctgttggtcactcaagaatttcttgtcaagcatcgggcactatcataagaaaacaggcaacaatagagacgttctatgccctcatgagctagacagataataagcaagcgagtagacttataacaagtaaaattataaattagcaaggataagtggtctaagagcccagagagaaactcagtgctgtgagacagagtgacggggatcacatttagaccagggagactgcagcggtgatgtcagaactggtgttggggctgggcatagtggctcccgcctgtaatcccagtactttgggaggccgaagcgggtggatcacttgagttcaggagttcaagaccagcctgcccaacatggtgaaactccatctctactaaaaatacaaaaattagctgggcatggtggtgcacacctgtaatcccagctacttgggaggctgaggcaggagaattgcttgaacctgggaggcagatcgcaccactgcacttcagcctgggcaacagagcaagactcctcaaaaaaaaaaagaaaaacaaactggcattggaaggtagaggaggcagcagtgcagagccagggctatggagcagcagcagctggggaacaccttggtgttgtccaggccgtggaagaaggctggttggctggatgcagttagtggggccagagaggctgtgctgatccagggaagtggagggggcagacccccatagctgggctgatctggggagtctggggcgggagaggcgacagagcttccccacagctctggtttggcctcacccactaaccatgagggtggtagcaacgcagacggaaagacatagaaggatttgaaatatgtctcagacagaatcaactggatttagtgacagattggttgtaggggaggaggagaggaaggagtcaaagatgacgccctggtgtctagtttgaaagggccattttctgagatggggagggcatagatatgtttaaaagctctgtttcgattatcccacatcaggatttaaataaagtacaaagaaggatcatagcaatgacaaaaactgagcaaagtaatttaatttttaaggtgttagaattctccaaaaaagcagaaccaaaagagagagagagagagagagagagagagtgtgtgtgtgtgtgtgtgtgtgtatgtagagagagagagagagagaggtgggggctggggagagagatttattctaaggaactagctcgagattatagaagctagcaagtccagcatctgcagggtaagccagcaggctggagactcagggaagagctgatactacagtcccaatgtgaaggccatttgctggtggaattccctcttcttcagtgaggttagccttttcttttaaggccttcacctgattagatgaggcccacccacactaactggggtcatttgctttgccgaaagtctcctgctttaaatgttaaacttgggccatgtgtgggggctcatacttgtaatcccagcactttgggcggctgagacaggaggatcacttgagcccaggagtttaagaccagcctaggcaacataggcagacctccatttctacaaaaaaaattttttttcaattagctgagcttggtggcgcacatctgagatcccagctactcaggaggctgaggtgggagaatcacttgactctgggagtttgaggctgtagcaagccatgattgtaccactgctctccagcctgggtgacagagaccctgtctcaaaaaaaaaaaaaaaaaaaaaaaagaaaagaaaaaaaaccttcacagaaacatctagaataatatttggccaagtatctgggtgccatgcctatccaagttaacacatgcaattaaccatcacagaatgtattaaaatatttaaattacttttctgtggggtgctttgtttgtgaagcaggctgtacaggattattaaacattctgggggaaagattgtatttaaatcatgtgaagtctgaggggctgtgaaatatgcaggtggtgatggcaggcaggcgattgcacagcaaatccggagctggatgggagagcagagcttgaaacacagatctgggggtcgtccatgaagagatccatgctgtctaatgcaggttcctgggatgatgggaatgttgtgtatctgcactgcccacagggcaaccaccaaccacacctgcttttgagcacttgaaatgtggcagatgtgactgaagactgaatttttaatttcaattttcatgttaaataaccacatcatgtgtggctgccatgttggacagcatgggcacaaatggaatttaaagccattaagagtggaggagagcacccagtcccttggtcttagggaagcatacagagggaggaccgaggaacacacctgggaaccccagtgtttgttgtggaggtagaggaggaggacacagcaaaggggaccaggaaggagcagccagagaggtggcctgagctggggccacaggcttcagcggcctcacgggtcacaggtgtcatctatgcatttattccctccctgccctcttgatgtcttagtgtctgcttttctgatacgatgttggagagataactgaggaaatagtgggcataaaagcactgaaaatagtcagaaggcctttctaacactgtgctgggtgaagcccacacatgcacacacctacgtcctcctgacagtgtgtgtgcgtcactccctgcagtcatccagacagactggctgctttgtccttgaatcagcatggctgtattggaaaattatggacctaaaagtgtttgttctcaggctccaaattgtgagccttgcctcctgggccagagcccctgtgtctggccctagtctctgcgattctgagcgcagaggctccgccagctgcccaggcctcccgcagccgtggcagcatgcagtgggggcaggctgaggccatggtataggcccctgctccctacatgcagggttgaatttcttccccagaccaatcacccgaccaccagggagtgtgtaaggcagcgtgtggaagactgtgggtctgtgatgagagtctgagtcagccctggatgtctggaatttttcattttaggatctgtttggcctcacagtaatcttgaattgggttgtgtcccagagcctaggattttatttgctaattacagcccgtttgccactctctgaaggaacaaccagcctcctgtttcctaaatgccccatcctggccacactctggaggagccacagtggctgcagtgacatttcgccacttcttggtgtgtggcttgccctgggggatgctggcgttctttttggtgagagaggccatatctatcacagttacgggtgtgggttttcaaagtaacgtatcccaacaggcagactcgtaccatataaaactgagcacacggggggaatcttactagagcagagaggggaaagagcaggaaagatttcctaaaagtgtgttagaagctgggattcacagggagcaagtggatgtgaatacagcacataccttgggtcatcaggatgagaggcacatgtgtccagccccagcctggagccgtgttcccctatgtgctcagtgccagggcatttttttttttttttaatttacacttacatcagaaagggcaccaagagaagcctttaatgtttgtaaaactattaaaatcaaaatctaaaaagtatgtgatagagttgttgatagcccagaatgtatagaaattatgaggtgtccccacctggatggaagcaattaaactatgtctgacattggtattaagtagagaatttctgataaaaactaacaagcatgtcttctatgatagtaaagagatatatgatcacagggtgcgatttacagtccatgaaagattttgtcattttgttgttgttgttgctgttttgagacagagtctcactctgtcacccaggctggagcgcagtggtaccatctcagctcactgcaacctccgcctcccaagtccaagcgattctcctgcctcaacctctcgagtagctgtgactacaggcacacggcactacacctggctagtttttatatttttagtagagatggggtttcatcatgttggtcaggctggtctcaaactcctgactttaggtgatccacccgcttgggcctcccaatagttctgggattacagtggtgaatcactgtgcccagccatttttgtttttattgttttcagtaaaaagatagggcattcacttgtccgcctttgcaactctctgcttagtccagacggactcaggtagtggactggaccttgcttatgtcagtatctgaaatgaatgaagtgtgaccctgagagggggaactctaggattggcatctttctcccgtcggttttgagtgtgaggcccaacgggcccaacccctcaatccctgctggtgactaagagttttgccacaggttgggcacttaggctgtcctggaactggaaggtcccaggcctgcaccatcatcccccgaccagggcagactgaagcagtgatggcgtcaccctgcccggctcctgtgggctgagctgcatctgaagcttacagcccgtgggggaagtgaggcccttcggagctgctgcttgtctgtggcttctgcctcccaggtggcctctgcacagtggtggtgacagtgatcaaatgaaagagcattgggataataacacttggtcacagatgttctgctgctgcaaaaatgaataaaagttactgttgtgaataaaaaaccaccccctctctgtattctatgtcaccctgtatactatttcagggtattttgagacagtttttcatcaagggatcctcccacctcaggcttcagagtagctgggattacaggcatgttgccaccacgtcttgctccgcttgtgttttcacaacagatactgaacatagaagaaacagcatgcagcacactgtgaaaacacagcggtgccaggcgttgtggcaacatgcctgtaatcccagctactccagagcctgaggctgggggatcccttgagcccaggattttgaggctgcagtagtgagcccatctaaaaaaaaaaaaaaaaaaaaaaaaagaggaaagaaaacaagtggtttcattagaatcaaactagaaggtttttgcataaaacgttgagtttaaaaatgctttctcgttagaccttactagtaatcaatacaaattaaaacaataaaatatttttagcctgatacatttggcagagacagtacaggaaaatagccacttatacactattgctggagccaaaaattggggtaacgctctagaaagcaatgtttggcattacatattaaaagccataaaatatttgacttctggaataatggtggcctaaaaactggctaaaaaccaaaaggactgaagtaaacacaaagacctcaatagcaccaaaataggagattgctgccattaatttgggctaaatggaaggaagccaggagttcacagctcccctctcagcagaacagagtagtgttagggtaacaagtgtgcagtttccagcccatgcccgctcctttcctttaatttcaaggaaggggcatggcagcttgggcaggatcaccacagatcaacagctttccaaggcatgggccacagactggaagaaaatgtggtggctacatctttctgtttttttggtgacctggtgcctagagtttgcttcagtgtcagggaaaacccgtcgcttcaggctctagatgttcaagcaagggtagagagtgagagccgtgggggaaatggaaaagggtataaaatgatgtatgaaatctaaaatacataattatgtataaaatctaaacatacaaaattaagaaatttggacaggtgctgtggctcacgtctgtaatcccagcagttcggaagactttgacaggcggatcacctgaggtcaggagttcaagaccagcctggccaatgtggtgaaaacctgtctctactaaaaatacaaaaattagccaggcgtggtagtgggcgcgtgtagtcccagctactagggaggctgaggcaagggaactggttgaacccaagaggcagaggtggcagtgagccgagatcgtgccactgcactccagcctgggtgacacagcgagactccatctcaaaaaaaaaattaagaaattctactgaggaacataatggccaggtgccatagctcacacctgtaatcccagcactttgggaggctgaggtaggcagatcgcttgagcccaggagttcgaaactagcctggtcaacatgacgaaaccccttctctactaaaaatacaaaaaaaaaaaaaaaaaaaaaaaaaagccaggtgtggtggtgcatgtctataatctcagctactgaggtaactgagaaacgagaatcacttggacctgggaggcagaggttgcagtgagctgagctcaagccactacactccagcctgggtgacagggcgagattccatctcaaaaaaaggaaatttcactgaggaacttaaaactgaatatgtagagaaacatttatatctcaattatacttaatataacaatttaattttaatataatcctaataattttgaaatgaattttggaatgggagaagcatgaacaaatgattcttaggttcatctagatgaacaaacatcagagaatagccaggaagagtccccaaaagaagccacacactagggctgaatgattgtggagcactaccattaacattctaaggggaaattattttcagcctcagattccctgtccagccagcctgttaactgaacgtgatggtagaaaggagaaattttcatacatccagaaaatgtgtctccccatattctttcttaagaaggaacctaggcaatagaatgggggtaaaatccaaaaatcagtgaggttctggagggcttggggctgtagggtttcatagaatgatgagatgattaagagctcgaggctgtgataaaggagaagatgagaaactgtgcgaggaagccagggtccaactatgaggcaggccctctgtgtcagaatagaatggcggcagccacaaggagaatgttaggacttaaaagcaacagtcagaatgggcaagaggccagatgagaaggaggcacaaagcccccctcccagtaaggaaaaccccaaacaagcagaaactgtaggaaaaaaacaaacttttgaagaaaggcagggtccaaatctggggcacactaaaatgtggggtgattttgggcgactggtagagtaacagaggaactcctttaaatgatgctttgagtggctcaggtcatgatggtggagctgtagaggacacgtgcccacagctggcttctgtgatgccgcttgtggttttcagcttccagaatcattctagtcagagagcgccgaggacttaaatgtgcttccagggaaggaagcaaaggttctcagctgtgacaatgtacaacttgaccaggtggagggaagaaagggtaatttactcctgacatacaaagtagagtcaggaagtgttgtccatacccagtgggacaaaaaatagaagttcaaggatattatttaaggtcacaaacatagctaatattaatacgggcactaaaattagctatgtgtctatagtgtaaggaggaggcagatgcatggtgcctgagtcctcatatgtcctggaggaagtcagtagaaaatgccttcattttagaaatcaagtagtagtcgtattagcatattacagagatacggaaataatccataactaaacagaaattgaaaggtagttctctgaaggaccaggattgaaggaaggaacaggttttcatttgatttaaatacaatctatatatactataatatatgcatttattactttgataatttttttgatatagcatcatgattaagcaactttgttatgcaacagaatgtttatgccataaatcttgcaaagtatgaattacctaaatcttgacaaaggtaaacaaaaatttatctttgataggtgtcaatcagtaatgttagttttggtgcagttgcaacctgttgatttttttttttcttaaactgagatcaaatattgtacacttgacttactattcttcgctttataatagtgaataatctatatgggaatatcagttgatattctttcctggcaaaagctatatattttaaattactgattccagtctctttgtctttttaacttagaagaggaatctcttgttggcatttgaagcggctgaaagtgtaggcatcaaacccagcctggtacgtatcctattttgtatccttgtgatactttaattgtatgagaaatgactttatgccatctgataaacagtttctcgtagaacattgacatctgtttgccgaaagtctgttgctctcaatacctaatatagagttatccagttgatataatcacatatcaacatatgatttagagattttcaatcgcataagatttcatatggacaaatttcagttctggaaacacagtggactgaattattattagagccctcttgttcagaacacctagaaatctgaataaaatgctatgttaaaaaatatcaacacatagctaagctcttaataaagaatgggaaatacccagatgccagaaatgtaaaacaaagcagaaaccaggcacaactgagcctgcaaaactcggcaggggtgggtgggggatggtgggccaagcaagcagcaagcctgcataaagccaaggctcacaacatgctgatcttcttagtgaaagcagaaatctctaaaactccaccagccagcccagggaggtgataaggaagctggtttccacctgggattgtgtgcgcacgtgcgcgcagagagaggaaaaggagagagagaaaagagagagagtctcttgcaaggaaaggaaacagggccagatgaggtttagagtccaaatttataatatctgtgctgcatgaagcccttagtatactcttagatgcaggaagcccctgggctgatactacaatggctgctaaaaagtaacagaacacttgagaaaatgatctacttgagctagtcagcagatatagcaaacaaaaggattatctaccagaacttgagatgataaataagagactaccaaaagactatttaaacatgaaagagataaaaggaggaatagaaaccacaaggaaagaatgattctatttaaaaaagagatttgtaaaaagaatctaacacttctagaaatgaaaaattggaattaagaccacaatatgtgttgccaaactcattagatacagcagaagagagaaatactaaattggaaaataaatacagggagatcacccaaaatataaaagagacattaaaaaatataaaatataatggtaaggttgaattagtatgtgttcagcttcaagaaatggaaaacccaaccagcagttgcttaaaccataaaaatgttaattttcttaacaatagtagttttagaactggttcaccactcagtattgtaatcaaagccccagagtgtctcctctccattctcaccatctttaatctgttccttttgtccccatgcttgttctttgtggttgaaggtggctgccaaacttcagacatcacttccacctacagggcaggaagaaggggaagagagagagcaagtgcctcctatctttccctttaaagaatgaaagtgaaaggctccctgggtttctccagctcattggcagtactctgttacatggtccccagctgcaagggcatttgaggaagtgagcatatgaacagttttcagtttctttagtgggaagcctgcgagggagagagcttgggaatgactgttgggctatctaaataatagtgtctgtctcagagtttaagagacagggacaaaaaaaatcagacaatggccatgtcccatgcccagagggaattccagatgaaaaggatagaaagaatggaatggagacagtatttgaagatatgatgcctgaaaattttccagaatgatgaaaggataatgaaagagtccacagattctttatttatctcaagcaggatgaataaaacaaaatatccatctagacatattgtaatgaaactacagaaaaagcaaagacagataatctattaaaaatttctgctcaccagtaataaaaatacaacctagtaggaaattatcaaagactagaagagaaaattcacagatgatgatgatgaatggtcaatgaggatttttaaagatgttcaatctcattagggattgggaaaatctaagttgaaataaaaatgagataacaattccagctgggtgcagtggcccacacctgtaatcccagcactttgggaggctgaggtgggtggatcacctgaggtcaggagtttgagaccagcctggccaacattgtgaaagcccgtacctactaaagatacacaaaattggccaggtgtggtggcgggcacctgtaatcccagctactcgggaggctgaggcaggagaattgcttgaacccaggaggcagaggttgcagtgagccaagattgcaccattgcactccagcctgggtgacaagagcgaaactccatctcaaaaaaaaaaaaaaaaaaaaaattccataaccctcaaagcatgtggggaatctgagaaatgaaaaagtgaatgtacatctattgtgaaatcttaccaccatgaacagtgctatgccagtgtaattttgaaacagaatggacagttttctagaaaaatacaagtatgtttcttcaaatattaaatgtaaatattcctatgaaacttaagaagacataaaactttaaccattgaagaggttgaatttatgctttaaaatgtagtcacacacacaaagaaaaaatatccccatcagcccagattttgctaaatctttaagacgcagatatccctattgtgtatttacaagtctgggaaatttaaaaaggtgtgaggaaacttacacatctgaccagggtggagtagcagggatctcccttcagaaacaacaaaactaaggagtaccaacagagagatcaggtaaggataaagatacaatgagaccttgttggaagattatattttacacagaatacatttttctttgtagtgttgtaattaatatttacttctgtttaaatataatatctttttcttaattttcatctaatgtgctatagaagttagtgagctgggaagtgaatgaggtcattttgttgtcctaattgtcagagccaggggtttcattggtgtggatggtctgtgaggagctgctgacacacatgataattaatctcaaaggcacttaggagtgtttgtgagcactttcccggctttttccaccaacaaaatagaaatttcctacattcttaaatttgcttttcagtaccttgatgtggattggaaaatccagtatgttgaattacacatgacactttaaaactacacccagtcagaagtgacagcagtaatccccaaatcttcagtcaagttctgttgttagattatgccaggaaaattgtcttatatgtttatattcaagtaaatataagtttctggggtataacatattaggatgagatctttatttttataatttcaacttttattttagattcaaggagtacatgtacaggtttgttacatgggtacactggatgatgctgaggtttgggatatgagtgatcctgtcacccagataggcacatagtagccgatagtttttcagcccttgcctccctccctcctttctccctcttgtagtccccagtgtctactgtccccatctttatgtccatgactacccaatgttgagctccatttataagtgagaacatgtcttatttggttttctgtttgtgcattagtttgctgaggataatggcccctagctgaatccacgctgctgcaaaggacatgattttgttctttttatggctgcatagtattccatggtatatatgtaccacattttctttatccagtctactggttttctttctccttttcttttttttttttttttttttgagatggaatttcgccttgttgcccaagatagagtgcaatggtgcaatcttggctcactgcaacctccgacttccgggttcaagcaattcttctgcctcagcctcctgagtagctgggattataggcacgcaccaccatgcccagctaattttttgtattttttttagtagaaatggggtttcatcatgttagccaggctggtctcaaactcctgacctcaggtgatccacccacctcagcctcccaaagggctgggattacaggcatgagccactgtgcccggccctttatccagtctactgttgatggacacctaggttgatttcatgtctttgctattgtgactagcactgtgatgaacataagtgtgcatgtgtttttgatagaacgatttcttttcttctggatatatacccagtaatgatattgctgagtcaaatggtagttctgttttaagttctttgagaaatctccaaagtgccttccacagtaactgaactaatttacatttccaccaagagtgtattcccttttctccacagccttgtcagcatctgttactttttgacgttctatcaatagccattctgactggtgtgagatgatgagatctttaaaaatgaagctctatagtgttccccagatattagaaagtgttctttctcagccaccgtgtaaggagagcatcttagccagcccaattacagatgcaagcaactccccagaaaaggaattaggcgagggacgatatgtgatgtcactgtcataaaaacggccaaaacatgtgtccccagggctgctgtgtctttaccaggccatgtagtccatgagggctgttgctcactgagtgccagcatgcccaccaggacagctgctgcaggactgggtgctggcatgcccccgtggagggaggtcaccatgcagcaattcctgaggcatggctgggcctactctgcaagtgtaaacttaatgagctgtgcttaaatagctaatttgtgcttgattgtgtgacaagcattttgtttttcatatttactgtatgtatttaccattttgggcatttttcatgcaaggacttgttggaccctcatggaggtcctgcaaggtggatgcactctataagaggaaactgaggcacatggcttatgagcgggaaaggcaagaggcaaggccaggcaggcagctccagagcgcatgccgtcaaccaccctgacagctgtgtctgccttctgcacataccttgttagatttagaccttagtggggtttttttttttttttttttggtgctattgtaaatgttattgtttttcttattacaaaatccagttgttcaattggtacataggacagcaatggacttttgtatactgaccttgtatcctgagacttagctaaacctgcatgtaaatgctttgggatttttctaaacaatcatatcatctgcaaataaaggcagttttatgtctccctttccaatctgcgtgccatttgtttctttttcatgccgtttagcactagctagaacttccagtacattttttttttgtttttgtttttgtttttgtttttgagatggagtcttgctctgtcacccaggcctggggtgcaatggcatgatctcggctcactgcaacctctgcctcctgggttcaagtgattctcctgtctcagcctcctgagtaactgggattatagacacctgtcaccatgcctggctaatttttttgtatttttagtagagacggagtttcaacatgtttgccaggcctgccttgaactcctgacctcaggtgatccacccgcctcggcctcccaaagtgctgggattacagtccagtacagttttaaataggacagatgagaaaggacatccttgccttgttcatgattttacggggggaatgttcaggtctttcaccattaagtatgatgtcagctgttggttttttatacatatcctttgctaggtaaaagaggttcccttctcttcctagtttgttgagagttaccacctataaaaactatcttgattgtggaattttgtgtaatgctttttcttcatctgttgatttgatcatatggtttttcttgttcagttagttaatgtgacgaattacatcagtttacaaatgttgaaccagccttgtgttcctgggatgaacctcacttgatcatgatgtattatacttttataggttaatagattgtgtattcatgagaaattggcatgtagatttcctgtaatgtttatgtctagttttggtatcaggataatgttgggatcctggaatgagttgggaattattctctcctcttccattttttgaagagattgtgtagaattggtattatttcttccttaagtatttgatagaattcacaagtgaaatcatctgggtctggtatcttttggagggtcttaactactaattcaaacaaatgtcatgcactataagattgttactaatgcagcatactctgtcttctgaaatgtataacatcttttcacaaattctcaaatatgttaacaatgtactaaatatttttagttcagttatgaagttcaagcatgtaagattgtctgctcaaaactgaatattgattggacttcggagtcctctctgagattaaagacacaccctttccataatacagaggaaagtgtgcagtgtgccatctctcttgtgtttgtaggtatcccttcttttcccagagctcatctatgtccaaattgcatgcccaattcttcatcagttcctttctgtaagtcatgttagcaacactccttggtacggattttaggttgccaggcctcagtctgtgtgcagtcatgactacagccagtgtaggtagaaggagacattctattcttgtattctgtgaaagtttgtttttcttttaaaattgttctaggtgtacctgcacggaatgttctaccaactcttcttccactcctttcccatgactaatgataggctgataattttttagcatcaccagggagcagaataagtgaagtctgttcagattttgaatcaggggatgaatggctcattaacagcctcagccaactctgttaacccccaggaactgatgtgctaagttcagccttacttttccatggcatctctgcttctggctttacatcagggtcctttcctactattctcttttaaccacacagaatccaaattcaatcccaaagttaattattaaatatgtccagtggcacaaatttcagaaaagtttgagtgcctgacaggatgcccaccctcttgcccctccctttctggcctggatgttatgcatgctcattacaagcttacttgcaaaatgaacaaaaataaatcagtcagtaaaaaccagcaaattagcaaaagtaaaataaaaataagccaaaaaatcaccaaactgtattaaataacaaacaaacaaaaaaacacattaagtagtaacaatgctggtaaaataaatggttgcatttgaaattggttcaaggcttttgtgataatcccactcagtaatttatcttgagggactagttcgacagaaggaaacaatactgcacaaagatgctgattgcagagtctgtggtggtcacgaggtgagcgtacactggatgccatgtcccttgtggacagcagtttccctggtgagtgcacattcactagaatggcagcccgcacagtggcacagcagcacggggacccgggtgtgaaatgctcagcccacgtaatggcacagcccacgtaatagcgcgtgcagtgtgctgggagtctggggaattagaggtggattcaaatgtaatttagaaacttggaaatcattttaatagtgaaattatgggtgatttttgctttttaaaacttgtttaaatgctgtcatatggttaaaagataaaagcagtgggaggtcatgttttccgtttttggaaagggacagtatctcctgaataagtgggaggaaaagtcctttaactcatcgctttcagcaccacctgtgctggccttcacgttctgtctgtgtaagtggagggtttccaggcagtgtaagccctaacctggactgaagtccttgaggggaaggggtctgtgatgtcctgccttgtgatctgtcccccattcccttcccctgcaggaactcagcgagatgctgtacacagaccggcccgactggcagagtgtgatgcagtacgtggcccaaatctacaagtactttgagacgtaaccctggagggcctggggcagccaccattgccacctactgcagcttttcctggaagcgcctgattactgtccactgaccctgctctgcccaccacccagctgcctagacttcaaagacaggctcaatccaagtggaccaacacccaaataagaaacagagtgggtcccacgatgtacctgtctgaaatgcaaatgcagctggactgtaaattggggactctttgatctcttgtgggatgcttctaaagagggcagcctccctccttccagaccaagaccccacacccaggcttgttttgctgattatattgggtggctgaacgaacacattatctgcagaaattcagacaaagaacatctccaaatcagtcttttggttgctgttgttaaaaatatcccggctttgcctttatgaaacctttgcccttggctgggtgtggtagctcgtggctgtaatcccagcactttaggaagccaaggcagtaggatcgtttgagcccaggagttcgaggctgcagtgagctatgagcataccactgcactccagcctgtgtgaaagagccagaccctgtctcaaaaaaatgataaaacccaaaactttgcccttgtgaaccctcccttcccccctccccccccaaaaaaaaacaacaaaacacaaaaaataaacatttgttccagggcaacctggaaacgtgcgtgcgcactcagccttttggggaaaaatgggagttctaggtaacaatgttaacacctggaacttgattcacttttagctctcaccatcccttatttgatttattgtagcaaaaggaaagcctgtgagaatgcaagggagcccctggctgctttgctggagtccctgggaggtgccccacacctctgccaccaaagtctgtgtgctcctgagcagctcgcggctttcacagtagggaaaccgcagtcctcgtcacctgcgcctttgtcctcccattcgtttaccctcccgttcacatccacacaggcttgtaccccacagaacttgacaggaggtcacatgtgtgaatggcctgtgtctgctttacagggttgagcaggctgagggtgtgtgcctctggggatgctgggctgacagcaaatcccaacagtatttcggctctggactgatttggcctttagtgcttccccaggcctctttcatcggcatgggaaaagcccttaggggtgggcggtgagggcacatttataactaacaaagaagaatgcagttgccccagcatcctactggtcaccttaagtggcagcagagccctccccagcggtgccccagtccctcagaagtgctcagtccggcccgagtgcccatctggtggctctgccgtgttcttctgggcggatctgtgtgcactacacagcgagtgagggcgtggctcacacagttgtttgagggaaatgggtaatgcccatcccttgctgttttaagtgccaaatagcgtgttagcgcccctccaacaaaggatcatccttccagtgagtcaccgagaatgacagtgactgccattactattcaaagtacatctctgattgctgatctgagccactggttcagagccaggttctagaggctgcaggtccagccccttaccattcctggagaggtaggagctcagtcccttcctccaagccagacctttgcagaggtggcaactgggctgcacgggtcagcagatccctgattctcaagccaccttgagacaagaactccgcccccctgttagtgcatcccagctgcagctctgcatcagaacctacagtggacccttttgaaaacactcttggctgccctagttggttaacttcagaatgtctggaatgggaccagagatgcagttcacatgttttgtaagttctttaggcgactgaagcacagctgcttggagaaccactgaggggtggacaccttcccctggcagccacaaggcaggcagcctgcgggagctcctgagcagctgttgggcgatggtcattacatcacccatgcctttgtatttaaatgaaactcgacacatagaaccaattcaacctgaaagttactacttctgctgattcaggcacttgtttgaagcattttttttttattaaccctgtacttcttctttgcccaccattaaagtgggggaaagtaatatcccaagtagttgagttgagctgttggttgt

SEQ ID NO: 579 - DNA, 45029 bp, Homo sapiens
  source 1..45029: mol_type = genomic DNA
cacccacgtcaacacatgccctggggtccctgaggccaggaaagcacaatagcctctcacctgggcagtaaatgttctggccccaaagtgacgcctgtcctaccccagggacccccagctccatgctccaggagggagggcaggtggatccaggtgtctgcaggagtctgcaccacaaccccttccccagcctttcagtgatcctacaggacttcacaggctccacagtagcgcatggttctgtgagtctgctcttgcagtctctgccctttgactggagtgttgtgtccgtctgtcgaggcttcaatgcaccaccccattgtgctgctctggtgtctttgagtttagagctcctggcgaggttaactcggtcagcatcttctcctggtcatgccagccccagcggcccggtggctctgaccgtggagtttgccatgtgctctgactcaggagcatcaaggctggtgttctgtgcgttttatgggttctgattgtgggttcatgttcctggggatcctcttgagttccaagtacacagtgtgatctctacacaggatttacggccattctttcaggggcctcctggcattgtcagtcccaggaaccttaagaaaactttaagccaggggtttttcagatctccacgtcacctcagagctcatgcgcccgtgagcttgggcttagttcattgttttcaaggatggtgggcggggatggcgtgcagggtggtgggagctgggcctggggtctggttctagaagcatcagggctggagggccttagacagttacgaggaagggtcgtctaccaggcctcggtgagagaagtgagcccccaccttccagtcactgggagaggactgaagaagcagccatcccccaagcatctccatcctcaaaccacacagagctcccgcccaggcactgagagggccctggggttccaccaggtgagtggcactggtggggaggcctggggacccctgctgcagaaagggccacgacagattacagtgagcccctgaggacatctttgaggttggggcctctgagctcaggtctcaggaggtgtctgctggtggcctgatgggctgcgagggtcttggtggtcagtggcccccccatgaacagcagcaatgcaagctgctcccacagaggagggggcagagtgagggcttctggggcctcgtccggatctcaaggtgccccttgtctgagcttctgatcgtcctgtgggcaggcgcgtgcctgccgggtttgtggatgcatctgacatgccatttgctgtgtcttctgaaatcctgtatgggccaggggtggcgtctgttgtggggagatctgtaggtctcaggcctgcctcccacacacacacagagcacgtgcctcatggccctgacggcagcaccaggcgccttctgaatgtgtgtccccaattagcgcacaccacgggtccctgcactgcacggggcccagaacaagtgtggggacagccagggacatttgtgagcaacagagatagtctttattcaaacgcagagagatccataacatggaaacactgacgcttccgaaaccgccccatttattcacttctcaagtggcccccgcttggatgcgccctcgggagagtgggctcagcacagcctagagcaccaggtctgaggtatctgcaaccacgtgggagccaggcccctggacgatgaaggacaatctcctggagcagcaataacttataaggagacataatttagagtagctggagccttggggatgactttatcctgcaggaggaggaggctgagagcagacgggacacgggggcccctaagaagcaaggttgggaaaggaggaggctgtttcccaatgcccgtgccggccaccagagggcccttcagtgcagagatggtcggcgcggcctcaccgcggtcaggagcagcgcgaaaccccctgtgccctcggccgcctgcagcatgagcctgcacaggagcccccgacaccccatggctccggggggccccaggggctgcggggctctggtcttagacgcagttatcagggacgcactcagcctcttcttcgagctcggggcaggggctcccgttgttggcgggctggacccggacgtagcgagtcctgctcttggtcccgagcctcccacagtggcctccgcacagtccccaggacgaccacagggagacctcgcagtccagcggcgtttctggaactggaccaagcaaaggggagaccgaggtgaacgctcgcgtgaagaggcgcttcgtacaaacggaagccacctcccaccaacgtgtgcattcatcagaggccacgcccacccttcgggggcacttgcgtttctccgcacagtcgcagagtgagcggcaagatgggatggcaccatagcaacctcggacacaacctagggactggagttgcgcgtttctacgtaagagccggagctgccgctcaagtccctgtggtggtggaactcccacatcgtggcagagtaaggggcccctgggaaccccgtgggaaccccgggagagggcggacacccctgctgtagaaagctgctctgcccgagcctggacccagctgctacatttacccgaataacagacaggggcacctgattagctgtcttgcgggacctggaccccccacaggactcagaccttttcagtatcgttctcgtttccctgtgtcccatctggttccataattttcataaatttaaaaatcatcatttggtgttatggttaagtcacttggtaatttccatgtttccaaagcaaagtgaaaacacctcttttgcaccccacaggccaagccagccagatggacagtgtttctctggctgtgtggcccagagcgggcagcccctaaggaggccaggagccccgcctcactctgccgtgcacgggaggacagtcagcaagggctcggctctcctcacaaatctgcgagtaccctgctgccagctttgtggctactgaaggatgagagagagtggagaagggggtcaatgtgcaggtgcagtgcctggactggtctggaagccctggccaggcccacacctggagcagccctctccagagatgcaggaacagggcttgcaaagaccttgggcgctgaggcttcgcaggggcactggtgtagaagccagagagccagggccccgggcagcccacctggggagcacacagagctgctggcagatcccagcaccccccagcttcctgactgaaaccgaggtggtgggagcgcccctgccctggctgcaatgaggagtcagtgagcactggcagtgcctgttctacagcgagggccccaccacaagcctctccaatgctgcagagccctgtcaggaggcctggggacaggcatccagcgtgtgagcaggaagccagagctgagccaggctggcttggcgtggacctggcggagcctcctgggtgccagccgccacatgcccatcccagcctctgccctcgggaagccagaagtcacaggagagacccttgtgggcggtggtctgtgctccgtccccactgcccactctggtccctcggctggcacagctggctctgtccgtctcccacccttctctccatgtcctgcctcctgctcagagctcatagcacagtctctccccacccttcccctgcaatactgcttctgcttggccacagctgactttatccctctcctagcccagggcactggccatgtgctcccctgcccactgtggcccagtgcccccaaatgtggggcaaaccgcacctctctggaccctctgcccacgaggggctcttcccgccagaccagttgcacaccacgaacagtgctggcacgtctgcctgttgggtaagtggctcggggacatctgcttggaatggggcatccgcgtggacaaatgagtgaggagcccaagcctgcactgggcaggggcagcaccgaggctggcacagggaggcccagttcatcccaaatgaggagggacccaggactgggcacagtctctgtctggggagtggttcccgccagccaggcggcctcctgtctgacctgacctggcccttgcttccagggacggctgacagtaagcttgtaattactgctgctcctcaagacgacatctgtccctaccacatggcttggggggcaggtgtggggcggccccgtacctgcctcaactccagccagcaacatggagggtggaggacgacggggcccatggccaggttggtgggctccagttcctcctcgggaaagtctgaagtccgctgttgtctggggcctacactgactgtcccacacccatatcaggtgagacccagagacccagagccaacaggccctgacccacgacccagcaatgcgctccagaccacaggcgctccgtgaggccagtggctgccacccagctgagtagggagggaactgccactcggccccagcgttcccagcctgccctgtccagcaggtgcctggaagagctaggagaatgctcatcagcacctgccccgccccaggccaaggcgcctgtgagcagagccccgagctgtgtggtggctgggtcccgagacccccacaggtgccctgcagcatagctgtcacccggtggccacacagggccatcctagcaagcttccttgtcagctgtgacacacaggtcacctgtgggtgcgtgtctgacaggacagagtctctcaggtactgtctggagcctcctttcattctttcctctgggctgtggccctgtaagatgctttcaactgcaaataatgtgcaagagtcacatcttcagtgtgtgaatcaacagaatcctaaatcttctaggcaccatcttgcagtacgcactacgaatccctacttggaatttctcagagccttaggttcgggtttggtggtcgccctgtggcagggttcggggctgctgtgtgtcccatgtgacctgtatgtccgttacctgaggcgctgtctacaatctcattgtccctgctgggcaggactggggcgggagggatgaaggccctggggctctgtcgcagccgcaccagtgtcaccctggcgatgggaggcagggccttcagccgcgggtagtagaaggagttggccgggtggctgggagaggaggacgttatctggggaggaagaagaggaggttggcctggggtccgagaagcccaccttctggtatgcgtatggcctcactggggccactgcccagcgtccagcgtgccctctgcaccactgttggggacagggtcccatgtactcctctcagccatcccacggaacacgggctggaaaccgaggccaggaaggggcagcctcctcgggacgcgcgtcccgctgtcctccctgcggtgctgtgaccccgggttgggagagtatgggagggctgcacccccttgctcactgctggcgctagaagcagagcctcttccacacaaaagccgcaagcggctgtcctgggctgggaggcgagggtgcagccaggccccagccccgtccccaccgcgggggccatagcggcccttgcgcacgcggggtgcccactcacctcggtcaccgtgtcctgcgggatggtggcgaagttgggggaggagaaggtgaagccgctgtccgtcccggcgtcgtaggggtacaggtccagcgccgcctgttcccgccaacggtccccgtcgcacaggtccaggctgtccacgcccacgaaccagtcggggctgggcacgatgcgcaccacaaacgagacctgcggcgacagcggctcagcgcgcctggccccggccccccggaccccgcccccggccggccccgcgctcaccagcgagtgcctgcgctgcacctccagctccgccgacgtctgcccggtgccgctggggacggcgggcgccgaaaacaccgcgtgcacgctctgcagcgcctcccccgccgcctcgatctccttcatcagcgcccaggcctcgccgcgctccgcaaagtcgcgcagcccgttactgacgtactggttcttcctccacatgctgtagtcggagctatgcgcggcccctgcaggaccacccggccgcgccgcggaccatggtcagacactgcggtcgggcttggattccagggggcgccccaggaaatccctccccgccgcccgcagggaaccatggcccccagtcacgtcggaccgtgacaccctgtggctgcccctgccgcgacccacctgcgccctccccgtgagcgccccctgcccccaccgcatccccggaaccgcacaccgcaggcgctcggcaaacattctggtgttagagtctcccgacgtcagcacgccccagactgggaagcgccgccgtgcagctgtgcggggggctccggcgccgcagccctcctggtggagcaggaggcgaggagggggctgtacttacccagcagcgaagaccactgcgcaggggggcggaacagggggtactgcttggggaaggccgtctggctccacttgcccgtgaaggtgatgctgtatttggccagggctctggcggaacagatggactctcccccaagaggctggccggcggcgccgagagtggccaggaggagagcgcagagggccttgcccagggcggcggccgggctggggttttccatcacctgggagcacagaggggagcagccgcgcgctggcaccgtcgtggcagcctcggggtggaaagccgagagggctgcggcactttgggctctgaggacggccccgagcacccgcgaccccctccctgctccgcaaagctctcctgcggtgcttccgagacccccatcagcggaatggacggcgcggggttagatcgcccgtgcgcctgcgagcgaccaggggtaacgggcaggttttcagtccgagtccctgcagcttgccgggccggtctgggtgcggcctccgggatgccttcgccgtcgcagggacccggggccttggccgactggctgcccccgggactagacccttaaagctcggtcgcagccagtcctgggggtccctctggaggtgccacaaggttctgggccgcggggaaagtgcaggaggcccgggccctctctgggtgtcccgggggcacgcagtactcacccggcaggagcagcgggagcgcggccggcagcggtcgggtcccagccagagcccggagctcctatttaagcccgaggccggcgccccgggccggccaatgaggctccagttcctcctgtcttcgatgctgcacggcctggcctccagcgagaggcagataggacgtgggagaaaggaggagaaggggctgcgggggcggcgggggctgccgctttcccaactcgccctgcccagcgaccttccccgggtcggatcaccctcttcccctggcagtgctgccgcacccctttctttgtctgtctgtcctatccctcccctcccctccctgtcccctcccttcccctcccctcccctcctcccctcccctcctcccctcccctcctcccctcccccctgtcctcctccctctccccgtttctctcccgttccaacaagcgccttcctggtgcctccctaggtgccactgaggggagttctttgccccaagcctttcgggaaagctcagggcgtgggggcagaggggctcttgttttcaccttctcgaaattagagccagcgtgctacaccttcttgcgcagggtgtgacctggagagccctgtgcgtggcctgacttcagtctacatgctggaagtggctggggaagctcctggctcccggcgcaggcatccctggcctttggggccctggctttaagtctctttcctggcatggcctaaagctgcacagaacagcctagcggtctgcactgtggccagagggcatttgcaagccatccctcctggagggaggtcagagtgggctgagggtctggggtggaacgcgcagggagtcaggaagagccacagaaagggggcccccctccccaggaccccgcacagggctggggctgcaggccggcggtgtgtgcggtgcagagccctcccaggggctctaggcttccctgcctttgggatgaagctaacagatgctgaagttgatcctgctccatgtcaggaaaatatttataggtccccagtcatgggatctggaaacagagcggaggaaggagctcgggaatggtcttgctcaatccttcccggcctctgctcatcggaatcacccagagggcttttaagcttagacaaaacactctgatgtttggaaccctgttaatgtttcacagattcaaaaagagagaaaaaataaatagaagcaactaggacagaatgcaaacagaaacaaatgatctaacctgtattttaagcgaaaaccacagatcagccactcaatgcagtatttagactccaggcccccaggccaaagacaaatttccacctccgtgcttctcaaatgtttttatctgaggactccttcatactcttaaaggtcactgagggccaggcgcagtggctcatgcctgtaatcccagcactttgggaggccgaggcgggaggatcacttgagcccagagtttgataccagccttggcaacacagggagacctcatctctacaaaacatacaaaaattagctgggtgtggtggagtgcgcctgtggtctcaactagtcaggagactgtgtctgtggtcccggctactcaggagactgaggtgggaggatcacctgagccaggggaggtcaagcctgcagtgaactgtgtgtgccactgccctccagcctgggcgacagagtgagactcatgcctgtaatcccagcactttgggaggccagggcgggcggatcacttgaggtcaggaactcgagaccagcctggccaacatggtgaagccccatctgtactaaaaatacaaaaactagctggatgtggtggtgcacgccagtaatcccagccactcagaaggctgaggcaggagaatttcttgaacccagggggcaggggttgtagtgagccaagatcgcgccactgcagtccagcctgggcaacagagcgagactccatctcaaaaaaaaaaaaaaaacaaaaaaacaaaaaacaaaaacaaaaaaaactaattgaggacactgaagaacttttttgtttgtatgggttatacctatggatacttatcattttctaaatcataacagaaatgttcagaatacttgccaattcacttaaaaataagaaaatattgctattacacattaacataaatagcataatgttttatgaaaagcaatcatacttttaaaaatgaaaaacccgcctgagaaaagtggcgtggttctacgttggtgcgaatctttgtattgtccggcttagtggaagctggattcccatatcggctccagcacttcatctgctgagatgtgctgttggttgaagtctatgaagaaaatccagccttggctgcgtatgttaccagccttgtcaggtgcctgctctggcctgcagccctcgaaagccgccgtgtgcccatcagagcatgggagcaaaaggtgccctcatgcaatgggcttcgatctcatcatctgcctggaaggatctcaggccctccacgagtccccagagcaggactggcagccgctgctcagaggctggactcgaatccacaggcctttttcccagagcggcatggggcggctgtactgcagctactctgcatccctggacaatcctcgctttctggacagcttcctcggctgaaaggagcacaggctccatggcaaagctactggctctgggtctgaggagaggaaggaggcgccgggtctggggcatgttcctgtgtaggaagccagggtgccgctccagagactcgctgaggcacagtccccatctcagtccagctctggccgtggcagcggcttccaggctcacccagtctcacaggaggccaaggaggctgcggaacagcccaggggcagcaggagctgttctcccagcccggccctcatgccgtctcagtgagctctgcgacctggggcccccacttggcggtgggcccaggctggggggtctccagctaggatgtagggcggtggtgggcccaggctggggggtctccagctaggatgtgggtggtggtgggcccaggctgtgtggggggagtctccagctaagatatagggtggtggtgggccctggcctgggtgggggttctccagctaggatgtgggtggtagtaggcccaggcctcgggggcttcagctaggatgtgggtggtggtaggcccaggcctggggatctccagctaggatgtagggtagtggtgggcccaggcctcgggggcttcagctaggatgtagggcagtggtgggcctaggcctgggggtctctagctaggatgtggggtggtggtagaccgaggccttggaggtgctccaggcagggccacagctgatttgtctgggaagggagggggcttgtttggagggctggagtagacagcagccaggaggaacttcctttggtagtgggaggcccctccaaaagcacgcctgcgaaggccctagggcaccaggggacatgggagcattctttgctgtgctcagagagggggacatgggagaactggggccaggtgggcttaattttctggatcctgtggccccttgggttggatcgggctggggtctcaggcagagctgtttctgcactgaggcagggactgcaggccagtgacggagtgatcttgtgtgactccatgctctcagagtcttgctggaaacccccctggctctcagaccctcttctgtgaaccagaagtctctatcctgccttctgctgagggtcacaggataagtatccataggtgtaactcacacaccagcactttgcaaggtgtccccccacccacacagaagagttcctctgtgcccgcaggcaggagcagccccccacatacacacacagtacattcattcattcactcacacagtactttcattcatccacccattcaaatagtacattcattcattcactcactcacacagtacattcattcatccattcacacagtacattcatgcaatcatccacacagtacattgattcacacagtacattcattcactaattcactcacacagtacattcattcaagcatccattcacacagtacattcaatcatccattcacacagtacattcatgcagtcatccacacagtacattcattcactaattcactcacacagtacattcattcaatcatccattcacacagtacattcatgcaatcatccacacagtacattgattcacacagtacattcatgcactaattcactcacacagtacattcattcaatcatccattcatacagtacattcatgcaatcatccacagttcattcattcattcacacagttcattcacacacttcattcattcattcacacacttcattcattcattcacaccattcattcattcattaaccacaaggtgagtattccttgcatctcagagatggggacaaaggagtgaccccactaggcccaaggttgcagggggctggggtggagtggatacattttgtagattggattctcttattcagtaaagtgtttagtgaattggttgacagcaatgccagggtcctctgaggacagggccttcctggaggtcacttgagccacttgccccaaggtggttttcaggagagtgtggctcaaggctgtggctggagccagtggctgctgcctgtctgcagctgggcagagcagcccctgtgtccacatccagctccacctggctgccctgccacggccccagcaggcacccccttgtctttgacacccccttagtgcctgctgtggttgggtaagtgtagaccacagtgtgagtaatcagcgcccacactcccagggtgttggcaatgtttaaaagttgtcttaaccaaaatgtgttgctaaggttggacttttggacaaccgcaggtgctgtgaagctcctttcccagtcaggcatcgggggtggagtctgtgctgcttaaattggatctgagcaggcgggtgtggggtttccatgggtttgtttgtgagccgcgtggagcagacggcatacaggaatgcctggcgagcctcccctaactgccaccctgctctgtttcgcctcaggctgtggccctgccccgggccccagaacccaagatcccttcagggggcaggggtcccagctgagaagggagaggccttctttacctttctgcatgggttctggcatgggggccctcagggtctggcatgtcaacggctctttcagggcttgcccacagcccctccctggggcgcggcacaggcacccaggcctggcccagcagcatggagctcctggccacatctgctgacaccacaccagctgactcagacgcggagtacccacccacgggagcggccgtctcctccagagcacccagactccaggatcagtttctggctcccccaagggaccctgctgcgcatttgaaaacccacctgaaaagtcctgtgtttgccagcccacccagacacatcacacttgcttgtccactcacggacatgtaccaagggcctcgctccggccaggcaccacgggctctgcacacactgagggcctccctccggccagacaccacgggctctgcacacaccgagggcctccctccggccagacaccacgggctctgcacacaccgagggcctccctccggccaggcaccacgggctctgcacacaccgagggcctccctccggccaggcaccacgggctctgcacacaccgagggcctccctccggccaggcaccatgggctctgcacacaccaagggctttgctccggccaggcaccatgggctctgcacatatctgctttctaaaggctactttagcccttgagacttcagactcgcagggatggggccacatggtccagtggttctcctggccccctccccctccctcatcttcagactcgaagggatggggccacatggtccagtggctcttcccgccccactctcctctgtccctcctcttcagcacccgctgacttcctccctggccaagacacccctggctgctcacacctcagggcctttgcacgtgcagctctccctacctaaaggattcttcctgtgctgccttcttcctgccatacaggcctcagggagaacagctgcaggccccaccccccacccccagaggagtgcctggtcatactctgtcatgccagggtttttttttcaatcagagctcctacagagaactaagcctaccataaccagtgtgagcagacagggatttactatgggggctaagtggcttatagaattgtgaggagggttgaagagagactgtggactgagtgtccaagggtgacctcccacactgcacagcaggacggggctgcggagtggcagctggtcccccctgtgcaggaacccgccaccccagcagcagatggccacgtgctcctgtgtccctcttgcccacatgcctccattctggattcaggtttctctgagcacttccgattgattggcagagcctgaatcaggtcagggaatccagagtcttggattcagctttgcagcctctgcagtccaggaggacacccagaaggaggatgtgaatcgtgccagtgagctgagctgcagcccacacagtgctcatccccctgctcttctctgacttatttagctgacgctgagtggggaccttgcccggctgcttcacctctggaagcacgactgcagccaccatgccaggctcacgggagggccagcaaacacagcactcactcttatcaggtttcacagtggctcttccagtcccaccttgcaaaggaggccaggtcactgctggcgagccacagatctgggaggagaatctgctgctactatctggttctaaatactgttttttctcctctgtgcaacagtccgcctccctcgaatatgagcctatccattttcagtgacacttgccatagtacctttttctatccacgttaagatgtcaagactgcagcaaaaagggcagcataaggacctctgagaattctcatcttcctccaagcagtgaggaaactggcaaaaaatgtcagaatacattttaagtactctggaaattaaccaaaggcgtgcagcaatctatgtagggttattttattttatcgataaaataggctgaatcttggtaagaacagcatgcattcccacccaccccctccagctctgtagtagccttaaaaattaacaacctacatttgtgataaaaactaacagcctgagctggagctctttcaaagcctcatttccagaaagtcattattatttgacctatctggtggttccctagaagacaccacttgcaaagctgtctgtttctgacttgattcagagcttacccagcatgaaaagacttctcctggggctattgttgaaaataataattataggcaattgatgaactttgcagttgcccaaggtggtggctaacagttgggcaagaaatagacaaactgaaaaaaaaaaggaaaatctgggaagtgagatgtcaatggggagctttgaaaaaatccaacctatttctgagaatctagaaggccacacatattcccaggtctgagctccagaaatacctcagaaggcactgagctcatacttctgactgaccttcaggctctatgcaagcaggaagtgagggctactgcagagttgttaactgcccgactgagtgttgaaagcattctctaatgcatagaacctcaaaacaaaaactgggagatgactggttctgggcctttaaggaaatctctgtctggccattaactgaccactaagctaactgaggagagacttagtggccacacatggtagataatacagattttgcataattaattcagaaaagttaataataaactacaacaaactctgggggaatggaggtgtatctggtttctggagttgccacattatactatttaaaatgttcatttttcaacaaaaaattgtgagatgtgagaaagcacaagaaagtatgacctacacatggggaagaaagcaatcgatagagactgtcattgaggaagacaagatgctggatgtaccagacaaatactttaaatttatggtcttaaatatcttccaagaacaaaggaaaacttttctaaataatttaaagtataagagtgatgttttaccacatagagaatatcagtaaaggacagaaattatagagaaccaagtagaaattctggagttgaaaagtacaataactgaatttaaactctcactagaggatttcaacagaagatttgagcaggtagtgtaaagtgtaagtaaaaaaggaaataggtaaattgaaagtatccagcttgaggaaaaaagaatgaagagaactgaccagtgactcagagacctgtgtgacatcatcaaacatacaaacaaatgcaaatgcataactgaagccccagaaagggaggagggagataaaggggcagaaaattatttgatgaaataatagctgacacttcccaaagataaagaaaaatgtttatctacacatccaataagctcaaccaattccaagtagggaacatgcaaagagatagccgcactgacacacatcattatcaaaccgtcaaagccaaggacaaagagagaatcttgaaggcatcaagagagaagcaactcatctcatacaggagatccttagttaggttaacacctgactttttaccagaaaacatggaggccagtaggcagttgggtgacatattaaacacattggaaaaaaaaatactatcaaccaagaagtttatatctgaaaaaataaaggtgaaattaagacattctcaggtaaatcaaaaccagagtctatcactaggaaatctgtcctacaagaaatactaatgagagtaccttagactgaaatgaaagaacacaagacagtaactcaaaaccacatgaagaaacaaagagcactggtaaaggcagtgacatggggacctagaaaagacattctaggaagattctgggaagatggtggagcaataagcaccagaaatatgtttccctacccagacaacaattgcactggcagaatctgtctgatgtaacagttttggagctctggagtctattggattgcagcttccaggagtaggtttggaggcaaaatgcagttaattttggcacaacagcagtcacccatcctccccaccagccccagcgcagacagttatgcacatgttcctgtagcagtttacagacagctttcaggagcgaggctggcaagaaaaaaggatgttgtccttcagatatttgggattggtgttctgattgctgattgctgttctgatcacaagagtgcaaagaagcaggtgcctattgtttcaccttcccccattgttgcaagctctcctgcactggatgaagtgacttcatttttctccttttccctttttggaagccagacattaaagactaggacattcaaaagcagctgcatgtatggagaaagttagaaagtgatatggcacatacaggctcagaaaagacctgagaagaccttatgtttgtacctaacgctgacccttggcacagagaaagcctacaacaacaacaaaatgtaacaaaaagcaacaaaccccagggaagggggaaacatgattttcaaaattgtgatattagattcaaatgtccgattttcaagaaaaagaatcacaaggcatacaaagaaacaggaaagtatggcccatttaaagaaaaaaagtcaatagaaactgttcctaaaaagacctgattgattatatatctactagacaaagactttaaaacaactgtcttaaagatgctcaaaggactaaaggaagtgtcaagaaagtcaacaaaaaaatgaatgaccaaaattgaaatattcataaaaagatataaaacctaaaaagaaaccaaaaagaaattctgaaggtgaaaagtataatcatggaaatgaaaattcactagagggattaaaaagcagatttgagcaggcagaagaaagaatcagagaacttgaagacaggacaatggaaattattgtctgaggaacacaaagaaaaaatattgaagaaaaatgaacaaagcctaagaaacctgtgggacaccataaaacagggcaacatatgcattgggggagaagagagactgaaagagtcaggagaacatttgaagaaataatagtttaaaattttccaaatctgatgaaagacatgtatataaacatctaagctcaacaaactccaggtaagatgaactcaaagaacccacaccaagatacatcaaacttttggaagacagataaaaagacagaatcttgaaagcaacaagaggaattactcatcacatacaaggaattgccacaagattatcagcagatatcaaaaactttggaggccagaaagcagtgggctgatatatattctgagtgttcaagaaaaaaaaaactaaggactctatatctagcaaaactgtccttcaaaagtgagagagggctgggtgtggtggctcactcctgtaatcccagctgaggtcaggagttcaagaccagcctggccaacatggtgaaaccccatctccactaaaaatacaaaaattagctgggtgtggtggtgcatgcctgtaatcccagttactcaggaggctgaggcaggagaatcgcttagaacacgggaggtggaggttgcagtcagcagagatcgcaccactgcactccaacctgggcaacaagagtgaaactccatcaaaaaaaaaaaaaaacaaaaaagaaagagagagaaaataaaactttaaacaatgaaaacaatgagggagttcactacctctaggcctgccctgcaagaaatgcttaaggaagtcctatagggtgaaatgaaaagacactagaccataacttgaagctatataaagaaataaagatctcaataaaagtagatatgtgagcaatgataaaagttagtattatagtaacactggcttgtaaccccacttttttgttttctaaatgatttaagagaatgtgttttttaaaagcatgagtcaagaagctagtattctcgtcactttggtttgtaactccacgttttgttcatactttgagcctaatgcattttttaaaattattaatttatgttttgaggcacacagtgaattaagatgtaattttgtgacatcagcaactgaaagaggtaggatagagctgtaaaggagtagaatttattgaaattaagcaggtataaatttaaattagagttataacattagaatgttaaatgtaatccccatggtaaccacaaaggaaatagctatataatgtacacaaagggaaatgagaaaggaatttaaatatttcacttgaaaaatcaactaaacctaaaagaagacagtaatacaaaaaatggaggacaaaaaactataacgcaaatagaaaacaaacagcaaaatgacagatgtaaatccctcattatcagtgattatttatctattttgttagttattttgagacagggtctcactctgttgcccagactagagtacagtggcaagatcatggctcagtgcagcctcagcctctcaggctcaggtgattctccacctcagcctcccaagtagctgagactacaggtgcataccaccatgcccagctaatttttcgtagagaccaggtttcaccatgttgcccaggctggtttcaaactcctgagctcaagtgattcacccacctcagtctcccaaagtgctggggttgcaggcatgagccactgcaactggccagtaattactttaaatgaaaatgaattaaactctctactcaaaagacagagattggcagaatgaatacacacacataattcagctcaatgctgtctacaaaaatcttgatttaaattcaaagacacaagtacactgaaagggaaagggtgaaaaaagggattccaagcaaaccaaaaccgaaagagagcagcagaaaaaaccactctaaaattcacatgggctctgaagggaccgcaagtagccaaaataatctttaaaagaagaacaaagctgggggactcacacttcctgatttcaaaatctcctacaaagctgtagtaatcaaaatctaataatctagtaaatttactacaaggttccagtaatcaagaatacaataagctggccaggcacggtggctcatgcctgtaatcccaacactttgggaggctgaggcaggcagatcacgaggtcaggagttcatgaccagtctggtcaacatagtgaaacccgtctctactaaacaaaaatttaaaaaattagccgggtgtcatagtgtgtgccagtaatcccagctacttgggaggctgaggcaggagaatcacttgaacccaggaagcggaggttgcagtgagccgagatcttgccactgcactccagcttgggcgacagtgcaagactctgtctcaaaaaaaaaaaaaaagaatacaataagcaataagctatgctctatctttatgccagaaataaactctcacatatatggccagatgatttttgacaaaagtgccaagaccattcaatgggagaaataatagtcttatagtcttttttctttttcttttgacacaatctcactctgttgctcaggctggagtgcagtggcacaatctcggctcactgcagcctccgtctcctgggttcaagcaattctcctttagccacccgactagttgggattacagatgtgcaccaccacccctggctaatttcttttttgtatttttaatacagactgggttttgccacattggccaggctggtcttgaactccttacctcaagtgatctgcccacctcggcctcccaaagtgctgggattacaggcataatccaccatgcccggccagaatagtctttttgacaaatggtgttggaaaacctggacatccacatgcaaaagaatgaagttggtcaagcctgtgatcccagcactttgggaggctgaggcgagcggatcacctgaggtcgggagttccacaccagcctggccaacatggtgaaaccccgtctctattaaaaatacaaaaattagccaggcatggtagcacatgcctgtaatcccagccacttgggaggctgaggcaggagaatttcttgaacctgggaggcggacattgcagtgagctgagatcgcgtcactgcactccagcctcggcagcagagtgagactccatctccaaaaaaaaaaagaatgaagttggaccttttgcctgacactgtatgcaaaaattaactcaaaactgattaaagacctaaatgtaatacctaaaactataaacttcttaaaagaaaacataagacaaagctgtacaacttcagattttacaatgatttattggatatgacaccaaaaacatgggcaacaaaagaagaaaatagacaaagtggacgtcatgaaaattagaatatttgtgtatcaaaaggcaacatctggccgggcgtggtggctcacgcctgtaatcccagcactttgggaggccgaggcgggcggatcacgaggtcaggagatcgagaccatcctggctaacacggtgaaaccccatctctactaaaaatacaaaaaattagccgggcgtggtggtgggcgcctgtagtcccagctactcaggaggctgaggcaggagaatggtgtgaacctgggaggcggagcttgcagtgagctgagatcgggccactatactccagcttgggtgacagagcgagactccgtctcaaaaaaaaaaaaaaaaggcaacatcaacagagtaaaggggcaactcaaaagatgggagaaaatgttttttttttttttgagatggagtctccctctgtcacccaggctggggtgcagtggtgcaatcttggctcactgcaacttctgcctctcgggttccagcaattctcctgtctcaacctcccaagtagctgggattgcaggcgcatgctgccgtgcccggctaattttttgtattttagtagagacggggtttcactgtgttgcccaggctggtctcaaactcctgagctcaggtgatccacccacctcggcctcccaaagtgctgggattacaggtgtgagccactgcacccagctgatgggagaaaatatttacaaatcatttatctgataaggcactaatatccagaatatatagagaactcctaaaactctaagacaaaaaactcaatttaaaaatgggcagaggacatgaatagacatctctccaaagatgatctacaaatggtcaataagcaaatgaagagattcccaacatcatttattactgaggaaatgcaaattaaaactataataggacatcacctcacacccattaagatgactactatcaaaaaaaccccaaaataacaagtattggcaaggatgtggagaatctggaaccctggagaactattgatgggaatataaaatgacacagttcctatgaaaaacacgataagagttcctcaaaaaattagaaatagaatgactgtatgatcccacattgcaactgtgggtatatacccaaaataatggaaatcagggtcttgaaaatatatttgtatactcaagttcatagcagcgttattcacaacagctaaaatgcaaaatcagttcaagtgcctaccaatgaacaaacagataagcagaatattatttagccttagaaagaaaggaaatttcaccttacaaaggaaggacatatgctataatatggatcacccttgaggacattatgctaagtaaaataagccagtcacaaaacacaaagattgtgtcattccacttagatgaggtacttagaatagtcacattcagagagacagacagcagattggtggttgccagaagctggggggagcagaaatggggagttgttgtttaatgagtgcacagtttcagtttcacaagatgaagtgttatggagatggatggggtgacgtttatacatgatgaatgtttttaatgccactcaactgtacactttaaaatggctaagatggtaaattttatgttatatgtatcttttttttgaggcaaagtcttgctctgtcatttcttttactataccttttaaggtgtctttttagcagatgccctagggattacaattaatatcttaatttataacaactgatctcagattaattataatttaatgtcaatggtatacaaaaactttgcgcatatatagctctgttccctcctcctcctctgtgctatcactgtcatataatttaaatgtttacacatcatttgactaccagcacagatgtctaatcatcactctctgcagttgtcttttaaatcaggtaggagaaaaaagagctacacacataaactatttatttttacactgccctttgaaaatgttttccccaattttttattgtaataaaatacacataacaggccaggcacagcaacacacgcctataatcccagcactttgggaggccaaggctagtggatctcctgaggtcaggaatttaagacaagcctggccaacacgatgaaacaccgtctctactaaaaaatacaaaaaaaaaaaaattagccaggcgtggtggcgggtgcctgtaatcccagctactcaggaggctgaggcaggaaaattgcttgaaactgggaggaggaggttgcagtgagccaagatcacaccactgcctgggcaacagagcaagactccgtctcaaaaaaaaaaaaaaaaaaaaaaaagaaatgacaaatatgttgaaatgagacactaggaaatatctatttaacaccaaagaaggccatatggaaacagaggaacaaaaaaaacctaagatatggaaaacaaatagcaaatggtgtgcctaaattctcccttatcaactcagtatgtagtgtcaactaaatgttaattaaacactccagttaaaaagcagcggatagaagggctgacttttaagaaccatgattcaacgcacattcaaagacactctgaagtaaaagagcaaagatagaatagtaagcagaagagagctggagtgactgtgacaatatgaaagaaaacagaccttcggacaaaagttgttaaaacagacaaggatattttatagtgataaaagggtacatccatcaagaaaatatcaccgttatcaacatatgtgcacctgacacagagccccaagatacatgaagccaaagcggaaatgatgaagggcaaaatggacaattcaacaataacagctggagacttccagctttcaatagcccatttccaatcatggataaagcaacaggacagaaaatcaaaagtcagtagaagacgtcaacaggctctaacccacctagacttggcagacgtctgtagaatactccaccaacaactgcaaaggttgttgtgcccattattctcaagtgcacgtggaatgtctgacagaataaacccgatgttgtcataaaataaatctcaacaaatttaaaatgattgaaatcatgcaaagtatgttctcttaccacaattgaatgaaattacaaatcaataacagaaagaaatttgggtaattaaaaaatatgttaataaaacactgaactccttagtatccaatagggcaaagaagcattcacaagagaatttagaagatagtttgagataaatggaaatgaaaacacaatatactaaaatacagatgaagctaaacagtgcttacagggaaatgtacagctgtggatacttacactaaataaaaagagatctcaaatcaataacccaaccttccacctaaagaaacgagaaaaaaacagcacagtaagtcaaagcaagcagaaggaaataataaatagtagagcagagataaattacagtagaaaaataatttaaaagatcaattaaaacagaccgggtatggtggctcacacctgtaatcccagcacttcaggaggctaaggcaggcagatctcttgagctcaggagttcaagaccagcaggggcaaacggtaaaaccccatctctacaaaaataaaaaatagctgggtgtggtggcacgcacctgtggtcccagctacctgggaggcttgagcccaggaggtcgaggctgcagtgagccaagatcatgccaccactgcactccagcctgggcaacagagtgagaccctgtctcaaaaaaaaaaaaaaaaaaaagaaagaaagaaagaaaagaaaacaaaaaacaaaagttggtttttggaaggccaggtgcggtggctcacacctataatcccagcactttgggaggctgaggcgggcggatcacaaggtcgggagatcgagaccatcctagctaagatggtgaaaccccgtttctactaaaaaatacaaaaaactagccgggcatggtggcacccacctgtagtcccagctacccacgaggctgaggtaggagaatggcttgaacccaggaggcagagcttgtaagtgagctgagatcatgccactgcactccagcctgggtgacagagtgagactccatctcaaaaaaaaaaaaaaaaaagttggtttttgaaaagatcaagaaaattgaatagccagactaagaaaaaagagaagactcaaatttactaaaatcaggaatgaaatagaagacattactaatgacattacagaaattaaaagatttatgagggactcttatgaacaatgtgccaaccaattaaataatctaaatgaaatgaacaaattcctggaaagacacaaactactgaaactgactcatgaagacatacaaaatctgaatagacctaacacaaatgaagagattgaagtaggaaaaaaaaaaacaaacaaaaaaaaacaaacttcccacaaagaaaagcccaggatgagatggcttccctggtgaattttaccaaatgtttgaagcataattaataccaatccttcataaattcttccaaaatagggaacacttcctcactcattcagaggccagtattaccctgataccaaaactagacaaaatcgtcacacaaaaaataaactttccagtatctcttatgaatatagctgcaaaaaatgttcaacaaaataccagtaaacttaatccagcaacattttcgaaaagattatgcacaatgaatgcaaagttggttcaatatgaatgattaggcaagaaaataaaattagaggcagccaggttggcaaggaagaagtaaaactatttctatttgcagatgacatgatttcatgcatacaaaatcatcagaaatccatgcaaaaacattggagctgagaaatgagttctgcaaggctgaaaatacagaccaatattataaaaatcagtcacgtttctaaaacaatgaacaatatgaaaatgaaattaagaaaacgattccatttataatcacatcaaaagaataagcttaggaataaattcaatcaaagaagtacacaacttgaacactaaaaactacaaaacatcattagaagaaattaaacatttaaatatgtggaaagacatcttgtgttcctcaattagaagaattaatattgttaagacagcaatagtccccatattggtctacagattcaatccaatccccatcaaaattctaactgctttttttttctttttttttttttgcagaaatggaaagtctgatcctaaaattcatacggaattgcaagaggcctcagattgccaaaactacccaataaaagaactaaattggaagacttacacgtcccaatttcaaaaattactacaaaactgtagtaatcaagacagtatggtactggcttaaggctaggtatagagacaatggaacagaattgaaagtccaaaaataaacccctacttttatggtgaactggtttcaacaagggtgccaaagtcactcacttgaggagagatcagctcctcagcaaatggtgctcagacaactggacctccatttgcaaaagaaggtatttggactcctacctcacaccatatacaaaaaaattaaccatgtataaaattgatcaaagacctaaaagtaaaagtcgtgagttttggcccacaggagtagacggacagggttgaggagccagtctcccagtgaaggtgctggaggctccttgatgctcttccctgacagttcagcctagagtgcactccttgggatgatggcgcccctcctctcacaccttggctcagaactcagcactgaaatccactgggaaggccaggggcaggagagacctctgcctagtgggagtgcaaggacagaggcctcctcgggctgtgtaggccctgcctggaggggacaccagaaccatagggtgtgtgcgaggcagcggttggatcagtgtggagagagggtggaggaggtgcccacaagttaccaaggtttgcagtgagttcctgtcattctacattcaggtacatagctcccaggacagccagcccctccccataggcctacacacccagccttcaggccacacccaggctggtggccgcagaccacttgggtccctgtttccagggctctgatgggatagaagagactcagccccatgaggatgtgggtgcccctcatctctccacagcaaggaggggccagaggaagccccatgctagcgtcaggggacaaggattccagctcaggcctgtccacggctgtgtgacccggcatgggttaagctctctcaaggcctcagtttcttcctctgcagagtgtgggatgggggtgacctcaccagatggccccacatgctttagcacagagataatccctttcctcgtgacccacagccagccaagcagctctactgagtgtgggactctgtccaagctctgagtcagccctagggctggtcttggcagccctgtgctggctggccagggttggctgtggagccaaggaaagggatttggaattcagggatttatgctttaaatttcacattttctttttcccaatagagtttcctactctcaatctcttgacacgatggtaaagccctttgctgtagctaaactcagttgccattttcggattggcattagggtgagaaggctgagtgctcacagggaagcctcttcccagcagcacccctgggctggaaagggcagcgggagcagcacagagcagcagagggtggctcaggctaagccggagctgcccggggcaaacaaagagggacctgcctccttgtttcttagcctcttaacacagaagctcgcagcctggattctaggaaggcttggggggtacggccatcctgctggaagcctttgctcctttagcccagagagcacttgccccagccccacatacaccccagggagatgccaccggccaaggagaggcttgctgaggccacggcccagcatcaagccctcacatcaggctgttccagcagccaggggccctcagaagcaaggccgagtggaaggaggtgccagggagggggcagagctcaatgtccactgcagcagctgctggggtcccttctctgctgccacctcatctggcacagggtggggcatgggatggagacatctgagtacccaccaggcccacacacatatgtggacatgcatgcatgccacacacacgtgcacacacttgtatacgtacacatgcccgacacagctgcaccatgccagatacacgcctcacacatgggtgcacacacacagcacatgtgctcacacaccatgcacatgcctgcatctgaggctgaccctgcctttgatctggaggatgctaatggaccctgcagagagaaagtggatgtcactgcagagactcagtgggcactggagggtgcaacgtcccctgtcccagtctctgcccaggtccatcctgtcccctgccccacacacccttcatcactgggtgtccccgtcaccgggtatctgtcctgggggagtccagcacgccaggcctggcctctctccagagcccccccagtctcagtgggccccaccctggggctggggaggaggaataggagtgtgggggagctgggtggggactgagtcctttctccaggagggaaggttgtgtgtccctacagccctgtgtcaccagaacacctccccagcaacaggggtcactcccgtaggacctgccgctgaccatgggacaagaacgtggggggcatgggaaggatgtggagggggcatgggaaggatgtggagggggcatgggaaggatgtggggggtgtgggaaggatgtagggggcgtgggaaggacgtggggggtgtaggaaggacatgggcggtgtgggaaggacgtggggggtggtgtgggaaggacgtggggggtggcgtgggaaggacgtgggggggtggcgtgggaaggacgtgggggggtggcgtgggaaggacgtgggggggcagcgtgggaaggacgtgggggacggtgtgggaaggatgtggggggtgtgggaaggacgtgcgggtggcgtggaaaggacgtgggggagctgtgggaataacacgggggtggcgtgggccctgctccctgtccctcttctttggacgaggctgccagtatgtggaacccaggggggtgccctgtggcccagcagctgttcccaccttccctgcagccacaagctttgaagtggccttgccagaggccccacaggacgtctccggggagctgcggccagactttgggcacagcaggcagtgcctatggggagagagacaccctccggccggcctccctccacccccagccccacgacggcaaatgggctcctccaagggtcttcggcgaggtgtgcgggcctcttctgccaaggccatgtcattgggaggtggcccagtcagggtggcaggaaaaaggaccaacggggctcacccgcaggtcccgatagagggaccacttcagaggcggttcaaggagccgagccccagggtgggaggcctgggaccagcccccgggggacagcgacggccccaggcctggaggaccggatggagcggctggcgtgccctgcagggggagtgggaagaaacggggaagccgggccgcggtagcgcaggccgcaggcagggctgtgtgggacagggcggcttgcacagcttagcttcttcctggcccgggtgggctccgtcctcttctctgggccagctgcgccggaggccccgggaagagtccccctgctctggcccgcgggacctgctccccagcctggaaagtctgagctggccccgctgccgggacaccctccccagcctcgctggtggcctggtttctgccgggcgcggggggaatgtgggtcagcgtttccaagtctggcccggggccagaggcagtggaaggaaaaacactcagcgggggctgcctggcagaggcctcacctcacagccggcggttccaaccccgcagccagcagaggcctcaccccacagccggcggctccaacgccacagccggcgactccaaccccgcagccggcggctccaaccccgcagccggcggctccaacctcgcagccggcgactccaaccccgcagccggcggcctcacctcacagccggcggttccaaccccgcagccggcggctccaaccccgcagccggcggctccaaccccgcagccggcgtctccaaccccgcagccggcggctccaaccccgcagccggcggctccaaccccgcagccggcggctcagggctcaggaccacagggagggcgccccaggcagctcctcctcctgggctctgcccccaccgccgtcctctggagatggcccgaggctggtgcccatgactcaatgtcccactcccgcatctcctgcggtcccagggcgggtcccgctggtgtgtggccggcctcgcaggaaccacttcgctctcccccatccactactcccacaggcaacaggaccggccccctggcccgtcggtgggcgcatcagcttggtggccctggccccctgcgcctcaggggtccctcacaggccggccagcttccagcaccctccctaagtcctcggccccttggaggctgccatggcacctgaacctccccccgcctctccaggcacagctcgaggttgggcggatgggggctgcatcccgggcaccacatgtgggtaggcactgccgcagcccctcgagtagccctcagcaagcagggctggagggtgggctctgtgcaaaaccgccatcacagccccagggccatcagcaggcagaggcgcaaagcctggtcatggccagcagccctgggatgcccctgccccagaccccccaccccggagacccccagccccaggatgcccacacctcagcctcccaagtagttgggactacaggtgtgcactaccacacccagctgatttttttttatttttgtagagcggtctcgctgtgttgcacaggctggtttcgaactcctggcttcgagccatcctcctgctcagcctcccatggtgctgggattgcaggcgtgagccccacgcctggccacgcgccttgttgagttggtgacttcgcctttgctgtggggatctgggttggggtcttgtggcttacatgagaatagaagatcatggggtagttcctggcaccctcccctcaaggaggctcacacaggccaggaccgccccctctggctgccccatcgctgccccccgacaggccctctgcctctcccctgtgaaccacgaagcacatcgatggggtgcctagcgccccgcctcagtcagggctcatgggggaggcccttctttaacgtctcttactgggcacacccagaggccacgtgttccagggtcagagagaccaggagaaatcccagcttcttcactcacggctgtgcatcttcaagaaggtgactgtgcctctctgagcctcagcctcctctgtctgacagcataggggtctgcaagtctctagaggtcatgtgagctccatgggaacctctcatctataccgtggaagcagctgcgggaagtgcacgtgagctctgtggcctcatgccgaccaagaccctgggggtcacaccaggcatagctgagaagcagagcagaggccactgcggtgaccagggttactcccgagactcagagcagaggccactgcagtgaccagggttgctgcctgcctgccacacaccccacttgggcctctggctgtctcctctcctgcagaaaccccatgggcaggtgtgcagccagcatggagggaagatgtgtgtgccagcagagagagcacgaggcctggagttctcatctgtgccaccagaagcaggggacagtgaaacatcatccatgaccactagggagacggctccatcccaggcatcacaaaccagcccagaagtgtcaccggtaagcgcgacagcagacactagaaggtatgtcatccatactcattatccagagaaggtactagaaggaagccagtcactgcctctgagtcagaccagaggacacccccctgacatcaaggtgaggccaaggggagaggaaacagggctaagtagggcctgtgatgtcagcatgtctggttgggcatgtggcagggacgatgactgagatagaagacataaacctccatggtccaaacatgggagctaaactcggaaagccaacaggacggggacatgatgaggggacttgagggtcacaggagctccctccgtgtctctctctccataattaggtctagtggcaacagaaaaatgcagacagatcaatatggatggtcatgctcacgttcctcatgggaaacagcgcttccgaagattcctcacgggaaacagagcttccaaacgttccgacttccgataagtccatgtctgttgtgtattggctgcaaagaaaacctcaaggaactaaaaagtagaataattaaaatgatcctgttatccaaaaaattgtaaaataaataacggaaagtgccacctcttcccccagaaacttagaaaccaacacactcccaggtagcccttgggtaaaacaggatattaaatctgaacgtgcactctctgaaaagccgagaagccataaatatcaatccataaatatcgaggactcagctaatgcagcgcccagagcccccagcacagctcttattttttagaggaaaaaataaacgagagggactttgtgccaccctaagaaactagaatgagaacaataaagtgcattttaaaaagtagggagaattatgaagataaagccagaaattaatgagtagaaaacaaataagtaaaaaggagaaatgattgttttctgaaagaaataaaataaaatccccttgcccagcccaaaagctgcatcaagaaatgactgcctaggctgggcgtggtggctcacgcctgtaatgcttacactttgggaggctgaggtgtgcagatcacttgaggcctggagtttgagaccatcctggccaatatagtgaaaccgtgtctttgcaaaaatacacaaattagccgggcatggtggtgcgtgcccgtagtcccagctacttgggaggctaagacagaacaattgcttgaatccgggaggtggaggctgcagtgaactgagatcgtcccactgcactccagcctgggtgataaagtgagactctgtttcaaaaaaaaaaaaaaactaaaacaaataaatgactacctctatttagaatttttgtacattgaaataaaaaaacccacacatgattaggaagaaagagaccccagtatggaagaggctggaggaatgatgagacagcccgctcggccggggcagctgcttcgaaacctgcagcagccatgttgtcgtgggtgtaaagtccagaatgactctggatgagcggcaccacgcagagatgagcacgaggtgctggagagggcgagagctgagccaggaaaggaggcaccaggagcagatgtccgcagctgacgatgacctcaccttccatggaaggaaagtcatcccagggttactttaaccttcccaagacatgaaaggatggaaaactctgtaattcatctcatgaaaccaggataatctaattcaaaaacctgatgtggaacaaaaagagaaaaccatagacaaatatcacttttcgcagatgcaaaaaaatctaagtaagagaacagcaaataggactcaatgcagcatcagcggattctacacaagagaacagcaaataggaaccaacgcagcgtcggcggattctacacaagagaacagcaaataggacccaacacagcgtcggcagcatcgtgttatggccaagcagatgaaggccaggcttacgagggcagcgcagtcatcagagacgtcatttcattagccaattagcacagaaaattcagagaacctcaccgacaggtactgaaaagaaaactgaccaaattcagcaatctttatgaataaaagcactatttctagtaaaatagaaaaaagtgcaaaagtctctgtccacaatagtggccaagatcgttctacgtggaaaacacaaatgtcacaaatccagggtcgactcgtggggcctgctgctgtcataattgtccagcattttctcggaggttctggcaaacttaatagaaaaaccaaataaatggcacaaatatcagaaaaataagacaatttattttgttgatgacatgattgtaaacctagttatgcctctgctccctcatttaaaaattaaaaatcaggccaggtgcggtggctcacgcctgtaatcccagcactttgggaggccaaggtgggcagatcacctgagatcaggagttcgagaccagcctgaccaacatagtgaaatcctgtctctactaaaaacacaaaattagccgggcgtggtggtgcatgcctgtaatcccagctactcgggggtctgaggcacgagaatcgcttgaacccatgggtggaggttgcagcgagccgaaatcacaccactgcactccagcctaggccagaagagtgaaactccatctcaaaaaatattaaaattaaaattaaaaatcagtaaaaacattttaatacaagataaatatacaaaaattagtaacttcccactcctctagcaataatcacctggaaattttaaaaaaagggagtcaaaatattccctttgccatggcaactgagtagttgggggtgaaggttaggatgctgtatggagcagctccggccatggggagctcgacagaggcgtcatttctctcccacatggtggctgagaatagctgggtgtgctgctctgtcgccacacatggggtccccccatcacgcctcttctctagccttccaggcatctttcctggctgtggggttctactgggtgcagaaatgcccacgtccagctggcaggaggggccggggccagggcaggagaggagaggccatgttttccaagaccggagctggcaggaacagtgtctccaggtgacaaaagcctccgacaatttggcgagaaaggtgggggtgggcatgagaggatgcagggcccccaccactcaagcaaggagagcggggggcagagccacggagaagacccagtctggagcctctccccccagcctgaagcccagcctccaggttccatgaaatcacctccagttattccaggagaaacggcgcacggcctaggaaagaaagaacaggcagcttggacccaggctccaatcccggctgctagttaccagacgggcagccacatcgcgtctgtgtgcctcagtttctacacctgcggctgggttgatggttgtgtccgcccggtggggctgctgtgagttaaggggtgagaaacgcttccctgtccactgtctctgacacgttcttcctgggtcacccctcactcaacacccccagagaccaggcaggctccacggacagttgagaaggcgtccagcctgcagaacggagtccaggacccagagaagcttcaggggtgagcagggtgggtcggggctggggagtaaatgacagagggagcaagtggagggaggaaggggcttcaggacaggaggtgcaggctaagcgaggatggctgagccgccctggtgtcagagcaggggaggctcagcgggggcgggggcgggctcagcctctgcgcttctgcctccaggatgttatggatctggcagggaacgtgtaaaccatgagctcaccccacgggaacgtggtttcctctggctgcccccacaacagctgttccccatcagcaccggccccatctccctagcaggaagctgggcagccactgcaggccaggtgtggacgaccctcacaactctcccatctgcgtggacatcgctggacggggtggtaagggggaggggagcagcgaggagagggtgggtgcagccccccacccctctggtccctgcctttgctgtgagcaagtggagaaagcccagctcctggaggtggggccaagtctgcagtgtcctcaatgccaccaaccaggcctgaccctgaccactgactgagcaccacgtggtgcctctgccctggatgtgggcacccccgtgccctcctggctctgttgcagcagacctgtacgccagggccttctagacggttctggcccctcccgtgtggactgttcccaccatacctggtctgggctgaggcttcctggcccttccccctcccaccctgacgaggttggcctggggcgcccatggatgcaccctgcccacatggccctctgcggtcacccacagccagcgggacccagattccctgcaggccaaatgcaggtgccccagttcctccagcccctccccccgcagtatgtgggcagtgacaaagagggggtgggtctggccctgtgccatgctggggccccatgcccgccctacctgccctgagtgtcccggccgtgagtccccagcccactggcttcaggcacttccaagccccttgctcgcttccctgaagaggctgtgggtttctccaggccaggcctgtggtcagcaatgcaggcaggtgtttgtgatcagggcatctgtgctatcaggaacagcccccaaaccacgcagggagggaggaggccctgagagagaaggtgccgttacatgcacgtgaccacagagaaggctgccttcaccccgtctgcaccccgggagtgcctgccacactgaggtccgcgcgcagtttctggttttctgatgctgacttttttttttttttggagacagagtcttgctctgtcacccaggctatagtgcagtggcgtgatctcggctcactgcaagctccgcctcctgggttcacgccatcctcctgcctcagcctcctgagtagctgggattacaggcgccggttgccacgcccggctaatttttttgtatttttagtagagacggggtttcactgtgttagtcaggatggtctcgatctcctgacctcgtgatccagccacctcagcctcccaaagtgctgggattacaggcgtgagccacctcgcccagccggtgctgccttcttgagccgtggcctccacagtgcttcacctggctcccgcaaaacagcttcattgagatgaaattcacatgctcacaagtcactctttacagtgtacaattcagtggtttttagcatgttcacgaagttgtgcaaccatccccactcatctcactccggaacacgttcatcatccgcagaagacgtcctgtgcctgttagcaaccgctccccgccacggtttgagtgaggccacaacagaacatcagacagcagtttatcaacagagacttcctgcctccccgtctggaggccaaggttgggttctcctcttccacgatggcccttgcacgtcgcatcctcaccggctggagggtgggtctgccccacaagcccttttcatggtggctttagtcacaagggctctgcctcgtgagtggatcaaacacctcccatcagtccccacctcccggcactccacggggtctaagtttcagcctgagctttagaggacggaaacgttccaaccacggcactgcacgccaggcccagtactcaccgctctcacatacaaaatcatatgagtcagcattctctagagggacaggactcataggatacatgaacaggggatgatcttggactccctgcccaccttccagacacatgggggcagggctgggcccccacggcttctgtgggctcagcccactcagtgctcatgggtcggagtctcctgcctgccgctctcccaggctgtgcttgctcgctggtggccctgcagtcctggggtctcggaggcagcccccacctcagctccggtgggcatagcctcggtggggactccgaggcagctccaaccccacgatgagcctctgcctgggccccaaggctgtcagcaacatgctttgaaatctgggtgcaggccaccatcgcctgcagtgtcagcgccccgtggatgccgtcaaggccccccgcatgtgcctttgggagcgatggttggagctgcgcctgcacctgcctgagccatggctggggcggccaaggagggctgggccaggatcgggggagacccaggcaggcagtgagctctgcggtcccaaaggtgccccagggtctcatcccttgccatgattctgtcctcagggcccttataaaagggctagaaggaactagcttggctgtttttcctccgaattctgccatgtgaggctggatacgccattggagctgccctcagcagaccccagcctgccggcacctggatcttggactccccagcttgagaactacaggaaataaatttctgttgcttataaattactcagtctgaggtgttttgttacagcagcggggatggactaagacccttcccattttcccccagctgtgccctcgcccccagccccgggcagctgggagtctactctgtgtcaccgtggacctgcccattccagacatttgacataaatggtctcatgtgatatgtggccgtctgcgtctgacctccttcacttggcaaatgtttgcgaggttcatccactttggagcatgggccagagcttcattcctttttacgggtgaagaatagtgtggggccaggccacaatgtgcccatctgtccctcagcagatggacatgtaggctgtgcccacctttgggctattgtgaataatgctaccaggaacatttgtggataagcttttgtgtggataagcttttgtttctgattctcggggacgtgtacccaggagtgggattgctgggtcacatggaattcggcttcacactttgaagaacagaacagccgcatgtgaggttcccacgtctccgccctgacacctatgatgctttcggttccagccatcccagtgggtgtgaggtgtggtctcgtgtggtttttatttgcatttccctggtggctaatggtgttaagcagcttgtcatgagcttgttggctggtcgcatatattatttggaaaaaacatctattcaaattcttttgccttttttttttgagttagagtctctctctgtcacccaggctggagtgcagtggcgcgatctcagctcactgcaacctctgcctcccaggttcaagcaattctcttgcctctgcctcctgagtagctgggattacaggcgtgcaccaccacgtggtggctaattgttgtatttttagtagagatgtggtttcaccacgttggccaggctggtctcaaactcctgacctcaaatggtccccccagcttggcctcccaaagtgctgggattacaggcgtgagccactgcgcccggcctctcccagtttgcccattttttaactaggttgtttatctttgtattgctgagctgtgagagttctttagcacactggtttttcactaccttaccctggagccgatacacatcctttctgctcagtcattagccagaaatgcagagaaatgctactgtgtgaccccatgacctcagcctgatgtgcaggggtccccagaatattagacgggcactgactgtctgcaggatacagacccgggagggtggctttgcactgctgatctgaacacagcctctcactgattcaaaacgtccttttggcgtgtctgtaatgcctgcgtgttcaccgttcgcattgttactgtgagcgacccacgcaccagctccacacggggctccctaggtgcagcctccggtgtgtgttaaaacctggtggccacggttcccttgttcatcttttgttccagaatttccttagttttcttacttatttttccacgttaacttcacaatcaatctacctgattccagggttctccggtgttttaattggccccgctgtggcagccggccagcacgagggacggcacctcgtgacgcccaggacagaccgggcttgttgctggtctgtggtcctcagtcaggcctcagaccctctataacaggtatagatgtgcccgccgtttgctcctagaaatttacaatttttgttgctgttgggaatggtcccttttctttcttcattgtctctcctaactggaagtgcttgaatttgaaagatgctgattcctgactctgaattttgtgcacagccaccctccgaaactcacctctgccttctaatcagttttccgggtctatgaggagtcgcagcaggctgtgctcgggtgcagagcctctctccagccgtgtgcatgcagctcttcccggggctcttggctgtgaggcctggcctgtccctgtggctaaggcggaagacccagctgtcccctccctgtgccctcgccacgccctccccgtaacgctgaccagactttgcacagggcagggccctgggggcacatggacaggaactggctgtgggtggagacagcacccggctgaggtcctggggaagaggccatgcccggagctcctggacacaggaggtggcgctggctgaggcccgatgcctgaactgggcatggggggaggcacctttgagctggggcctcctcggagcagctgcacccaggggcaaaccctgcccctcggtttccatgtccacatctttactagaactgcagctggcatccgtggagctgtgggctttgtccagggagagccgtgcccagcacctgggggaccctgcagaggtgctaaggttcagggttaaaaacgaggatcctggcctcccgcaatcctgtccccagaggccccatcggagccgcctggccttccctgccagcccaagcatccgaggcttttgccagcagtgcctacggcagccttgggaagggtgggggcccagggaggggcatcatttggtgttgatcaggggagatgctggcgtcaccacggccccagggcctccaggcccgcccaggctccctcactcagatgtcccacccacaaacacctgaccaggccccaccaggggcccctctcacccctgaagctgtgcaggccctcggctgacaaactgggaccctcagcttggatgggcagaaaggtccaggaggggcctctgagacctcctcgctcgggcctgggggttggggccgcaggaagccatgctccgcccgatgcccacccctagctcccctggctgcctcctggcctctgtctccctccaggcccccaaccctgaccagggagtggggggttgggggcggagcttttgggaggaggccacgcccagcattgggtttgcatttccagggagggcttctcctgcctggtctcctcccctggtactgggctgggggctgtcagggtgaccctgccctacccaaggctgacccggggccatgaacaggaggatgcccccctccctgctcctcatgtgtgcccccacgggagccagcgggcagcagctggaccccagcagcctctcagggcacccaggactggagagggccctgccaagggtctgcgggtgccactcacccacccggctgcagcccccagctcccctgggctgaccgtgggcctaggccgagctgaaggggctggcggttgtcagcccttggtctggccccaccactgctctgccagggcagggggaggccggcagcccaggttgtggggccagagggccacgctgtgacagacgagaagagggagtgacctggagggcccggggcagggaccaacagcaaatgcctccctaggtggtctctccaggacagatgtgtcccctgtgggagggctggggcgcccagcaaaagcagcagctcctcagggaacggggacccagcgggctgagtggggctcttggaatagaaggagcctccccaggctcagctctgcaggcggagaggggaggcagggcctgaggctcatggtagggaagcggccttgccctgtgaggtctccctcagggggcagaagagccgggaccccgccagcagcagagaacaaaccccagtctaaggcgaaccccaggtgtggggtaggtgtaaaagcagatggctttgaccacgagtgcacaggtgaggggcagacaggtgtgagcaggtgtgagcaggtgaggggataggtgggagacacatggagggtgggaggagatagggacaggagaagaggcagtgggggcaggtgtggggcaggtgtggggcaattggaggtgggtgggggtggatggtgtcatttgggagtggatggggttaggtgtgagcaggtgcagggcgggtggggagcacggggaggaggctggagttggtgtgggcaggtgcagggcagtgcccgggaggcactgtcaggtgaatgtggggctgggcagaggctgacctgggacgccagggctgctgctgagaacctgctgtctgggcaggcagccgggccccgccaggtgtgactgcccactgcacagagggggtggaggccggaggcctagacgcctgtaggggctgggagggatgtgggtgagtccggctgctcgacaccctccgtcccaccagtgtccacagccctggccccggctggccccggcgtccccacagtgggcacccccagctggagccagcttgcatcagggacctggatagtgagtggcgagccctccacagtgggatcctacagacactgctaccactgaccaacggggtcagtagctggtttaaaaaagaaagggcagcagagaggccacccagaagagccgctgtttccatgtgccgcgcttacacatgctccagagggtccggctgcctaaccatgcgccgcgcttacacatgctccagagggtccggctgcctaaccatgcgccgcgcttacacatgctccagagggtccggctgcctaaccatgcgccgcgcttacacatgctccagagggtccggctgcctaaccatgcgccgcgcttacagatgcacctaaccttatattgttcaagtctcatgtcctgcctatcagggatgttttcggaccctacatgggaagcccttggcccgtttgaaggtcgggtcagggggcggctgaggctgtccagggcagtggtcaagggcttggggaagcggaggtagactcaccaggtgctggtgctcagaggggccggggaacacccacgccctggccgggccaccccgtccctcctggtgcttgatgccaaggggagcgggtcaggccgcgagaggcccagggccagcctggggagcagagctgctcagcggggcagaggtcctcctccgggcgccgggctcagggcccagtggccagatggttttctttgctgcagggagtgccggctgcgggggtaggcctgggagggctcatgcagctgctcttgggtttctctgctgttgttttttgctggaaaatcaatcctgcaagtccagctgggctctggctgagagcagctaggggtggggatggtgggtgcttcccggcccccacggggcaagttctgggcccacagtggggagagaaggcaggatggggtgcagggccagcctggggtggggccccgaagagcctggctccctgccctgtgccctgcttgggccaccccagagggactgtcccgaccctcccaacttcctgccaaggcccccggagctgcctgcagcctccccttgctcccgtgcccggggcggaagtctacaggagaccagagcccgggtgttcatcagcagccgcaggagagttccccaccaaggcgcagtagcctgaggtgctggggctgcccgaccctccccagctccacccctcttgcctctgagccctacccaaggcctggagaatcaccgcttcctcctgctccaggggttccagcagggcccttggaggatgtgcctgccgcgttctcagccctctctgccgacctttcttgaacggactctggccacggtgccaacgcgtcaacggtctgtccgtctgctgtccgagctcaggggccgtccatgcctccacggctggcatacagtagctctggttttacccatgagggggaagcccagcacccgtgccctcgatcacatcgccagttcacaaacacacatgcgcacacgcacacgccgcccgcccaccaggcagacacccacacacctgtgcacgcacgcgcacgccaagccagcgggccctgcccctgccccggagccctcagtgtcagaaccaggctgctgtggctgtttcctctttaattcgcctgagttttatgagcccaaattcatagacctttgttgctgcatataaacttgaggataaacttgttgaatttgttcaacgtaagcagctgaaattctgcgtggggtggtgatgaacggctctagcactcggtaaaaggtatttaaagcgcatgtagtttacaacactaacagcccgccgcccgcgagcacagcccgtctggtcatccggcggcctcaccgttcaccacggttggcggccctggtcactcccacggtctttaccagccgggtgccagtggctgggaccaggttctgaccactgtgcccactcactgtggaatcgcgtgagcaggccagaccctgcgtcgtaaggacagagcaggacacgtcctgtcatggggcacccgctgtctgcgactttgtttccgtttgtttccgcctcagcttgggggagacagttggcaggcaccagaggcgctcctgtgaggtcacctggccagtctcaggattagctgcaggctttggctgattttcttgggtcttgtacacagatgcttgtcagcaaataccagagacttatctcttcccttccaacatgcaaaccttccttcatgttcttgtcttaagcgttttggcacaacctccagcctaataccagcctctagggagataaacagtgctgccgatttcacaggccaggaaaccgaggctgagggccccccacccacctcctgctaccccgcacccctcctggggccttgctgggcggggtgactccccggaggcggcaccaaggggaggttcgtttcgaggctcagagcacttttctgacagctttctgtcccttacatcccagactcagttacacttcagcgtcccggctccctggccgccaggctcacaccacagacagcccttggaggcattccattcctgccccgacccttcaacttggaaacatggaaacaatgaggccagctgagtgggagcctccaggcctgtgtccagagctagttcccagtgtctggctgcctctcagggcggggcctgtctccagctggagctgggagggcggcccaccctgccagaggccagccccaccctcggctgccgtgggggctgaccagggcccagtgacccagcccagggcttgcctgtggagaggctggagtcagccgtcagcgcggaactcctggtcttcccactgccacctctgcagcccccaccagagatatcagaaaacatcagctccagcctgcagcccagacacttgaagtcaccttggctgcccctcctcacacccgtgcccacgtcagcaaaaccagggccggcttgttaaccgtgtccagaacccacccttcccaccctgcccaggccacctccctcagtggcccagggggctccaagttgaagagcccaagacaggtcagagatgggctgggcggcctctgccactcacctccggagagggcagggagcagaggcctc

SEQ ID NO: 580 - DNA, 88580 bp, Homo sapiens
  source 1..88580: mol_type = genomic DNA
gtcaaccgcaggagttaatttctgcctcaacacctgaatagcgaatgctcgtagcagagatgcaacaacagccttctggtgcagtacgaaatctcgaaagacaggcaggcgcggtggctcacgcctgttaatccccaaactttgggaggtcgaggcaggcggatcacctgaggtcaggagttccagaccagccttgccaacatggtgaaaccccatctctactaaaaatacaaaaattagccgggcgtggtggcgggcacctgtaatcccagctcctcaggaggctgaagcaggagaatcgcttgaacctgggaggcggaggttgcagcgagccgagattgcgccactgcactccagcctgggtgacagccaggcccggtcgcaaacaaaacaaaattaaaaccatgaaaggaatcaggatttgccaggagtagcatttttgcttggtaagaacaaaattttgtttatacatgaaataaaaaatattttattaaacctcactgcaaagtggcaactttttgctaaattcataatttagtctacacacaagctatgtacccgtatgtgactgccaagagttatatctttgcttattaaaagcaaagtgcagttcatacctgagattttttttctggatttaaccaggaggggaaatatttttgctaggtaagtccacattttacctcacaggcgaaacagtttaccgaacttgaccaccaaagaaatcgttttttccttgggagatccacattttagttcatacatgagatgtgtttctgaattttaactgccaggagtagtgtttttccttagggtaagtttcagtttccacaggaaaaatctgaatttatctgcaaggagtaaaatttttgcttaagtccaaattgtacacgaaatattttactaaatttgaatatctttaacattggaagttctttttttttaaacactggaagcattttaagaactgcaagaccaaatttaaaaaaataaaaccagtaatatcatcgatgattaccaggtgttactggaaataattctggcgcggttggacaaccccccaagcacccgggggcctacccaggggaggggtcccgctgcgtgaagggaccctagggagggcgacgtggaccacgacagacaaacgggcactcgaagacccccgaaaatcggccccagcgagccgcccccgcccccaaggcacgattgtgggggcggggacggctcggggcgcgcgcagcgcgtacccggcgccacggcagccccgcccccagaaggacgcgcgcaggagggggcgtggcccgaggctcaccaaccaatctccagagagcctcttcctttccctttccctttcaccaatcaggcgctgggaggggcgggcgcgactttttttcccggcggccccgcggctctgcccctcgtgcggtcgcgttcccggcggcgcggggggcgtggcctgggcgcagcatctataaaggcgggcggcggcagaggcgccattttgcgaacggcgagcagcggcggcggcgcggagagacgcagcggaggttttcctggtttcggaccccagcggccggatggtgaaatcctccctgcagcggatcctcaatagccactgcttcgccagagagaaggaaggggataaacccagcgccaccatccacgccagccgcaccatgccgctcctaagcctgcacagccgcggcggcagcagcagtgagaggtaagtgccccgcccccgtccgaagcttccagaagcgccggccgcgcaggcctgcggggggccgtcctcggggcgccagataggtccccggcgcgcgagatccgcccctttgtcaaggccagaatcgcgccggggacgaggtaggcgcagggcgggcctggaggtcccccccggccttagcagtgctctcgggggagtcgggtttggggggcaagggtgcggagttggatttggggggcaccgtccggggcgcctgatttgcgggaggggcatgggtcggaggtcggatttgggcgcaggacggggagtcgggggaggcgtgtgtcttttgcggggttcgcgggatgggactcggcttcggaggaggggagaggcttctggtcgagggttggatttgcggggcgcagactgggaattcggtttggaggaagggtgtgcggtcgggtcggatttgggaggcgcacgatggggcaatctggttgggggcggggtcggccttggggggctggtccgcggacaggcagggcccgcggggctggtgaatctgcacttttcggtcccggccgtcgagcgtgcgctgcgggagcggggagcgctttgcggtggacgagctcccgcgggtccctgttgcctcgatgtggcccctgcacgcgacggacctcgtgggccccgtttttcgcccctgagcgagtcggtctggatggcccgggacgcgccgggcgaggccgcgcacgtagacggcacccagggcttctccgcgggggccgccggggagctgggggtggcgcactccgacagcccggcagcgccctgggaagacccccgccgcttcccgggaagacgcgtcccgcttccgggggcgcgggtgccagctgcggttgtgggggagcccgcggggtctcggtcgagctttcccgactgcgtcccccgaggtgggcgtcgctcagccccggatcgggaggttgggccgcggtgctggcggtgccgcggtttgggggccgtgcaaaatggaggcaactttggggcctgtttaccctgcgcagcaaatggctgctggcgctgccggctgcgcgattgtgaaaatctcccccggggcgcgaggccgcgtctgcctggatgacgcaaccgggagggcccgggcctggagcgggggcgggggggcgggcggccgggagccggagcggggcgcgtcctccatgaggtcaggctaggcccgcccggtcttcgcggggacaagcaagagtcccagattttggccgtagtgcagggtggaaaggggaagccgcgacagaactgaaaaggggaagcgctggctgtcttggtggccggggggtgaggctctgccccggcggggctgcgtgaggggaaggggccccccgccctgggaaggttgggctgtcctgggcggcgccgcccgaggagtcggggctcagtgactgctgcccttgtaggtgcttggggcaggcgttggagctgccttcgggaagcctcgggggtgtgggaccgggtgggcccctgcctgggcggggcggggtcttttggccgaggcaggggtggggatgtgctgaaggccgcccggacgccctggaggggtctccgcccggagcctggcgctgcctcgtgacctgcatcatcttcagttccagggtctccctccactgctgtagtaacccgggtccggggcctcggtggtgctcctgatgcccctcacccacccctgaagatcccaggtgggcgagggaatagtcagagggatcacaatctttcagctaacttattctactccgtgagtatggggccgggcctgctggggctgctctggggccacaggtactttcttgtgcaccttgctgcccgtacctgtgattgaatgtaatcgtgggaaccctgagtttcatcagagccggcgcacagtctcctgcagcccaggcgttgcctgagctcaacacggcctaggcccaagctttagcgctgccgggttcttggagtcctgtggggtgagtcagggttctgaattgggctgcaccccctggacaggatgatcggctgaatgtaacagaggaactaacgtccaacgacaagacgaggattctcaacgtccagtccaggctcacagacgccaaacgcattaactggcgaacagtgctgagtggcggcagcctctacatcgagatcccgggcggcgcgctgcccgaggggagcaaggacaggtgaggggcaaggacaggcagggagtgctcacccaggggagcagggaccaggtgaggggcaaggacaggcggggagtgctcacccaggggagcagggaccaggtgcgggttgctgcccaaggggtgcagggacagatgagggagggcactgccttcaggcagcacatatgggggccaccatcgctttgttggtggggacagggtccccccttttttttttttttgagatggagtcttgcttttgttgcccaggctggagtgcagtggcatgatcttggctcactgcaacctctgccttccgggttcaagcgattctcctgcctcagcctcccgagtagctgggcttacaggcgcccgccaccgatgcccagctaatttttgtgtttttagtagagacgaggtttcgctatgttggccaggctggtcttgaactcctgacctcgtgatccgcccacctcggcctcccaaagtgctgggattacaggcgtgagctaccgctcccggcctggggtccctttttaaaaagtgcactccaaattcgtaccctgggattctaccctccaagggatgccaggcagtgtcagagcttttctgtcatggggcatgcacgtgggtgggtgcagcggtgctgctcaacactgtggtgtcaggacggccccacccagaggacgatctgggccccagggggaccctggagtagagcgggcctcagggtagctgctaaggcccaggaggtaggcaggtgggtcgggccagccgagacgctgacactcgctgcagctttgcagttctcctggagttcgctgaggagcagctgcgagccgaccatgtcttcatttgcttccacaagaaccgcgaggacagaggtaggtgacccgtatcgcctgcagtagggtgcgtgggggtgcctgcgccgccccttcattctcagcccgcaggcacggtctccctgcgggggtggggggtgcgggcggggggttctggtcggcaggggttctgacggcttctcccccgcagccgccttgctccgaaccttcagctttttgggctttgagattgtgagaccggggcatccccttgtccccaagagacccgacgcttgcttcatggcctacacgttcgagagagagtcttcgggagaggaggaggagtagggccgcctcggggctgggcatccggcccctggggccaccccttgtcagccgggtgggtaggaaccgtagactcgctcatctcgcctgggtttgtccgcatgttgtaatcgtgcaaataaacgctcactccgaattagcggtgtatttcttgaagtttaatattgtgtttgtgatactgaagtatttgctttaattctaaataaaaatttatattttacttttttattgctggtttaagatgattcagattatccttgtactttgaggagaagtttcttatttggagtcttttggaaacagtcttagtcttttaacttggaaagatgaggtattaatcccctccattgctctccaaaagccaataaagtgattacacccgatgcacctggctctgtggtggtgacgctggggactggtgggaggagtgcctgggaccacagagggccctgggtggaggggtcgcgggggatttggcacccaggcagctgcgggacccctcccacggaggagaccccctgggctgggaggccgggccctcagcttggcgccagccttgccactgctcgcttgaagccccttcctgcctcgcgtccccttccgccccagcctgggcctgcgcatggggatgtctgtgctcccaactcaacttttgagttcgccgtgttactggccgcccctagggacctgcagcgccgttcggggcagcagcacttccggcggggtcgtggcctggagcgcttccgggtctgcaaccccgccgtctgcccggccgcagcgccacctgccggccgcatccgggagcgccacccggaaaatcagggccaggcctggccgggaaaccggctggaaagaggaggaaaggaggaactcgaaaagattgtagacttggcgagcgggccggggggatattcagccgtctgagcggtggtggggtcggccgggaggacaaacctggacacagatacccccagctcatttgggcagcgcaaatgcagagaaggggcattagagctgaggccatgcaggatgaataggagtatgaagcagagtagagggggctgttttctggtgtaaaaaacaacttgggcaaaggcgtggaggctggaaagtaacctccagggatgaacgacatggggttggagactctgaggagactttggaagagccctgtatgtattctgaggcactggggagccatgggaggtgtttgagctggagagggacctcatatctggggttggaaagatcctcccaggactgccatggggaatggaatggaggggcaactctgagtctccaggaaggaagccacaggcaagggcagtgcagtgtgtcagaggcataaaggaagactccatccccctccagtgagtctcctctgtgcctgtttattacatcatcctgtggtattaagtgagcacctactgtgtgccaagcctggcctttgcccccagggaactcacagccttgtggacagtaacagaggaataaatgctcctgagagtgggcggagaacgcagggtaaggagctagcgatggcccagagtgggcacctttatttgtttagagaaagtgaaactgtagccgggcgcggtggctcacgcctgtaatcccagcactttgggaggccgaggcggacggatcacgaggtcaggagatggagaccatcctggctaacacggagaaaccccgtctctactaaaaatacaaaaaattagccgggcgtggtggcgggcgcctgtagtcccagctactcgggaggctgaggcaggagaatggcgtgaacccgggaggcggagcttgcagtaagccgagatcgtctcaaaaaaaaaaaaaaaaaaaaaagaaaaagaaagtggaactggaacagtatggcagagggaacagcctacacaaatgcttgggggcgcgaaagaagttggtgtgtcacggaggaacagggagggaggcagggtgggcgcagagggattgaggggaggtggcagggaaccgcggggactgttttagggaaggtgagtccagaccccgctgagatgagctgggtgtctaaggtcccagggagccttcccttcccgtgacaccaccaagcaattctccaccagggacaggggcattcacatgcccaaaatcactggccatcttcagcacaagggggtgctccagagccaggaatgcctctggtcccggcattggcctctcatggagacaatgacagaacccacgcggaagagcgccctggctgctggggaaggcagaacacagagagacattgatcagcggggttgtccacacctggaagtggcgtgggggccctggcttcagagagctgctgcccaacacaggaggcgctggccagcccccagccctggaggggcagctgcattcctgggaagcccttgacccacatccccagcacgggaggggaggctctggagtggggcattgctctctctgctgcgctcctggactctgcaggaagagggtgtcttggctatcatggagacgctgacctcagccccagccctgcctcctgggcaggcctggaccaggtgtgttcgccctgggttggggtcagtcccacagcagcgccagggcctggcccatcgaggactcggtggcctcggccaggtattcgcaacacagccagtcctcgaggctgggagcttccccacctgcggcccgctctgctaggcgcaggaccagcagcccgcggcgcacccgcagccagggcccgagcgctcggagccagggaccaagcggtgctccgcggccgcgcagctcaggcccgggcccccagagcagcgcctgcagcgcgccccgcgtccgggacgccgagggccgcaagcgggtcagctgtgctgccaggagctccaggcccgcggccaaaggcgtggtcgagggcgcagcaaggctgagcagcgctcggaggaggctgcccagctgcggcgcgtgggggcccggggatcccgggggtccagggggctgcagacagacgcggccaaagtcagtgaggagcaggcgtgggggccccgtcgtcgcacagccccgaggtgccaccagcagcaagttctccggccgcaactcgactagggccgcgccccacgcctccaggaacttcagggccgcgctcagctgcagcagcagcagggccacagcccacacgaactcctccggcggctgcgtgcaggcctccgccagccactgcgccaccgtgcgctctggaacctcggctgccagcgccactgcgcctctccagggcgccccgggcagtgtgccttcaggcaccaggccacacagcccctgcagattgaagtgtggagacagggaggcctgcagctccaggccccacgggtggggcacgtccgccccgggcttgggcacctgcaaggcagagggggtgtcggggcctggatcactgggccccccacaagcaccgcctgccccagtgctacctgccccgaagcctcccacgcacacccccaaactgcccccactacggctaggggctgcctgcatccctccagcagcaggaggtcagtgttaatttggaagttagtcaccagtaaggactttcaggaaagttaagccagggaagaagatgttcctgggcaatgagttcgaaagcagattcctgggccgggcgcggtggctcacgccttcccagcactttgggaggcagggggatcgctgaggtcaggagttcgagaccagcctggccaacgcagggaacgctcgtctctactaaaaaatgcaaaactagctgggcgtggtggcgcgcctgtcatcccagctacttcggaggctgaggtgagagaatcgcttgagcccgggaggtggaggttgcagtgagccgagaacgcgccactgcactccagcctgggcaacagagtgagactctgtctcaaaaacaaaaaacaaaacaaaaaacacaaaagcagatccccggccagagaggtgtgggaggggttttgacaagagctccaaggccatacccatggccccatactttagaaacatggtttcctgggttaactgcgttgattcacgtgttagttgcaaaataaacaagtctaatatggtctggatctgtgtccccaccaaatctcattccccagtgttggaggtggggtctggtgggaggcgacttggatcttgggggtggtttatcatgaatggctcagcaccatctcccttggcactgtcgttgggataacgagtgagttctcgtgagatctggctgtgtaaaggtgagtagcacctcctccctcccttcctcctgctcccaccgtgtgagatgcctgctcccgcctcgccttccactatgattggaagcttcctgaggcctccccagaagcagaagccaccagaaccatgagccaattaaggcccttttctctataaattacccagtctccagtattcctttttcttttcttttcttttttcttctcttttgtttttcttttttgagacagagtctcactctgtcgcccaggctggagtgcaatagcccaattttcgaatctcagctcactgcaacctccgcctcccaggttcaagtgattctcctgccttagcctccaagtagctgggacttcaggtgcgcaccaccgcgcccggctaatttttgtatttttagtagagatgggggtttcactatgttggccaggctggtctcgaactcctgacctcatgatctgcccgccttggccttccaaagtgctgagattacaggcgtcagccactgtgctgcccagcctttttttttttttttagacggagtctcgctctgtcgcccaggctggagcgcagtggtgcgttctcggctcaccgcaagctctgccccctgggttcatgccattctcctgcttcagcctcccaaatagctgggactacaggtgcccaccaccacgcccggctaattttttgtctttttagtagaaacagggtttcaccgtgttagccaggatggtctgtatctcctgacctcgtgatctgcccgcctcggcctcccaaagtgctgggattacaggtgtgagccactgtgcccggcctttttcttttttttttttttgagacggagtctcactctgttgcccaggctggagtgcaatggcccaatcttggcttactgcaacctctgcctcccgggttcaagcaattctcctgcctcagtctcccaagtagctgggtttacaggcgcccgccaccacacctaatttttgtatttttagtagaggctgggtttcaccatgttggccaggctggtcttgaactcctgacctcagctgatccgcccgccttggcctcccaaagtgctgggatgacaggcgtgagccaccgcgcccggctccagtatttctttacagcagtgtgagaactgactcacagaaaggccaaatgaaacaagccctgggttatgtctaagatggggcactggggacacctcagagagggtggggctgtggggctcaccttggcgaccaggatgtgccaggcgtcctcgtgcgcgcgcaccacgcggtaatacagggcgtccccgctctctgcgcagggtgagctgtctaggaggcggaagctgtggccggggtggcagggcccggggtggccccccatgagccgggcacggagccgggcatagatggtacggaggccctgcagctgccgcgcagccagtgcagtgtgcacagcctccgggctgtgcagatcgcggagggagaggcccagtggggcgtcagccgggccaaaggtcagctctgcagggagacaggctggtcccactgcagcctggctcttgtccacactgtgggaccccagaaagggtctccgaggcggctgtacttggatggagctgggatggagggtcctgcgggtgggcagtgactgggtccgggttaggatcttcttgggcaggggtgggggcaggggctctgggttggtggagagggacccaggggtccggaggcggcaggccttggagggcagcaggtgggcacggatctgacctgcagggagagacagtgggggagggttgaggacaggcggagtgggaacgggacacgtgactccacctctcagcctcggtttccccatctctaacatggaagtaatgaggctgggcgccggtggctcatgcttgtaatcccagcacttaggaaggtggaagccgaggcaggaggatcactggaacctagggtttgagaccagcctgggcaacatagtgagaccctgtctctgcaaaaattttttaaaaatttgccggacgcggccatgcacaatggctcatgcctgtaattccagcactttgggaggccgagatgggtggatcacgaggtcaggagatcgagaccatcctggctaacacggtgaaaccccgtctttactaaaaatacaaaaaattagccgggcttggtggtgggcgcctgtggtcccagctactcgggaggctgaggcaggaaaattgtgtgaacttgagaagtggagcttgcagtgaaccgagattgtgccactgcactccagcctgggcggcagagcttacagaaggggaaactgaggcttataggaggatggatcagtttcagagagtgatgccacccagcactcagcgactcccacttacctccgtggctttgcacaagcgtctgtcttgctttttttcttttttgaagtcttgctctgtcgcccagcctggagtgcagtggcacgatctcggctcactgcaacctccgcctcctaggttcaagcgattctcctacctcagcctcccaagtagctgggactacaggtgcccgcccgccactatgcccagctaatttttgtatttttagtagagatggggtttcaccatgttagccaggctggtttcaaactcctgacctcaggtgatctgcctgactcggcctcccaaagtgctgggattacaggcttgaaccattgcacctggcctttttttttttttttttttttttttttgagatggagtctccctctgtcgcccaggctggagtgcggtggctcagtcttggctcactgcaccctctgcctcacaggttcaagcgattctcctgcctcagcctcccgagtagctggaattacaggcatgcaccaccatgtctggctaatttttgtatttttagcagagacaggttttgccatgttggccaggctggtcttgaactcctggcctcaagtgatcctcctccttggcctcccaaagtgctgggattaaagggtgggattacaggcatgagttaccgtgcccagcctctctctctttttaatggtatatatttttttctatttcatggctcactgcagccttgacctcctgggctcaagggatcctcccacctcagcttcccgagcagctgggactgcaggctcttgacaccatgtccatctcattttttttgttttgtagagatggggggcgggtctcattatattgcccaggccggtcttgaactcctggcctcaagggatccacctgcctcagcctcccaaggtgctgggattacaggcgtgagccaccacgccccgcccaccaacccacaggttatttttcagccctggcctactccgggccttcccggaggtcactcattttaccagctgctgctgttcccagaggccatggtgcccggcaacctcctgccgctccctgcacccacctgccgctccctgcacccccctgccgctccctgcacccccgcagcccagggctccctggggagctgcttaccaaggttgctatacgtgggctgagtcgaccaggtggggttgtcgggctcggggggctctgtggggggctccgggctgctcatgttgctggggaaaggtcaaacggggcgtgtgtggggtgaccgtgtgcacgcacagggcgacatggggaggggtccgtgagtgctggggcctgggagaccgtcgaggcctcctgctccagggcccttggtgagaacaggcgcacccacactccactcccttgtccagttttgaccctgctgtgtgatcccgagtgggtttcctgtcctctctgggcccctgctgtgtgatcccgagtgggtttcctgtcctctctgggcccctgctgtgtgatcccgagtgggtttcctactctctctgggcccctgctgtgtgattctgagtgggtttgctgccctctctggggccctgctgtgtgatcctgagtgggtttgctgccctctctgggcccctgatgtgtgatcccgagtgggtttcctgccctctctggggccctgctgtgtgatcccgagtgggtttcctactctctctgggcccctgctgtgtgattctgagtgggtttcctgccctctctggggccctgctgtgtgatcccgagtgggtttcctactctctctgggcccctgctgtgtgattctgagtgggtttgctgccctctctggggccctgctgtgtgatcctgagtgggtttgctgccctctctgggcccctgatgtgtgatcccgagtgggtttcctgccctctctggggccctgctgtgtgatcccgagtgggtttcctgccctctctggggccctgctgtgtgatcccgagtgggtttcctactctctctgggcccctgctgtgtgattctgagtgggtttcctgccctctctggggccctgctgtgtgatcccgagtgggtttcctgccctctctgggcccacttcctcaatcatgaggcaggtctgtcacccatcaattttccaggcagtgggaaggacccccctctgcacgtttgggatggggacagagtgttcagcctgaggacaggcctttgggggtcagttgcgggggagacagtgtccagggacccagggatccacactcaggcctcatccccgagggctcagccgtgcggttgctgccggcagccaggcctcgacccacccccgcccagatcccaacctcaaaaagtggccgcttctgtccagctccccgctccaggagccccctaccttcaagactggcgtgccctctgggggaggaggggtccgtggggacaaactcccaatggccacagcccctggcctcgcaggaggggtctgacctggcgccggcagctgacaggaaaacgtccggcccactgtcagaccgcagcccggggtggggaggggacatttctgcaacacttccccagcagccgaggccgccgcctcccctgcccgcccgcagaggacaggatgtaaccgggagggaacagcctggacagagaccaggaggtgggatctgaaagtcaatagccccagggctgacagccgggtgggggcagtggaaggccccccacagcctcagaggccaggctggggtgcggggcagtggggagccctgtgagatggggagagaggggcagagctggcccaccgtaggggagcgcacagaacacggtggcggctgtccctggagaaggtgcaagtggggtctgtgggtttcacttccccgggaaccacctcccctcctgcggcagcatctgaggagcccccagcggccccctgccccatcccagggcccccgaatgtggagcgtgggcgaggaccctcccggctctgccgcgcctcgctgtgtgactgcgggcaaatccccaccctctccgtgctccggcgaagaaagaagagtggctcccacatcccgcctgctaacagccacgcctgctggatttttctttgaaaagatggaatcggctcgttttcccccttcccccttcctcactgcctcgatgcatttatttagaaaagacgttttagataaaatcaccataaatggaaaaatcaagaatggaaaaaacccaaggaaaagcagacgcggggtgaaattccagctgaactgcgtgcctgtcaaaactgtctttttctttggagacagggtctcacactgttgcccaggctggagcgcagtggtgcaatcccagctcactgcagcctggaacgagctcctggggcgatcctccctcctcggcctcccaaagtgctaggatcacaggtgtgagccaccctgcccggccccaaagatgtttttgctgcaaggattgagtgtattttatgtgggatccccgatcccgtttcccttagggaaaatgggcccagaaagagtaggggctccatccagggtcacgcagcagctcgaggctgggagcagaggtccacagagccactgctgagtccccctggcctcccccaatcccctgagaaggggcaggaggggaaggagactacatttttcttatgaacttcccttgagtgggtcccatgccacacttttttttctttgaggcagggtctagctccgtcccctaggctggagtgccgtggtgtgatcatagctcactgcagcctccgcctcctgggctcaagtgattctcccacctcagcctcctgagtagctgggaccactggtgtgcaccaccatgcctggttaatttttattttatttatttatttttgagatggagtctcactctgttgtccaggctgcagtgcagtggcgcaatcttggctgactgcaacctccgcctcccgggttcaagcaattctcctgcctcaggctcccaagtagctggtactacaggcgtgcaccaccacacctggctaatttttgtattattattattatttttagtagagttggggtttcaccgtgttggccagcctggtctcgaactcctgacctcaggtgacctgcccgcctcagcctcccaaaatgctgggattacaggcgtgagccactgcgcccgccacagagtttaaaatgatgcaaaggctgggcacatgcctgtaatcccagcactttgagaggctgaggtgggtggatcacttgagcccaggagtttggtaccatcctgggcaacacagtgagaccccatctctacaaaaaataaaacatgagcctggcacagtggcgtgtgcctgtggtcccagctactcagaaggctgaggtgggggcattgcttgagtccaggaggtcgaggctgcagggagctatgatcataacactgaactccagcctgggcaacagagtgagaccctatcacaaaaataaatcaataataaataataaaacaatgcaaaaacagacaaacatgcacctcagtaatcaagataaacatcattttactgaatgtttcacaaaacctaaccggcaaactatgggccgagcctctgtttttgtcaataaagttttattggaacccgggtggaggagcagggtaaggcaaagagaagcagggttaaacaagtgcagatcagatcctgtctttatttaaaatattgataggccaggtgtggtggctcatgcctgtaatcccagccctttgggaggctgaggctggtggatcacctgaggtcaggagtttgagaccagcctggccaacatgctgaaaccccatctctactaaaaatacaaaaaaaaaaaaaaaattattcgggcatggaggtgggtgcctgtgatcccagctactctggaggctgaggcaggagaatcgcttgaacccgggaggcggaggttgcagtgagatgagattgcaccactgcactccagcctgggtgacagagcaagactccgtttaaaaaaaaaaaaaaaaaggctgggcgtagtggctcatgcctgtaatcccagcactttgggaggctgaggcaggcagatcacctgaggtcgggagatcgagaccatcctagccaagatggtgaaaccccgtctctactaaaaacacaaaattagccaggcatggtagcctgcacctgtaatcccagttactcgggaggctgaggcaggagaatcgcttgaacccgggaggcagaggttgcagtgagctgagatcgtgcactccagcctgggtgaaactctgtcttcaaaaaaaaaaaaaatgttggtagcgtggtgtggcctctggatcaggcccctccagatcctacagctgtcctttcatttgagaagcccttattgagccatgggagctggggccacattttctctggatccccagcatcacccagtacggggcagggcagggatgccgtatgctgatggatttttacatgacatcggccttttggagaaaaatgcctgtgttttgtttgtttgagacagggtctcactctgtagccaggctggagttcagtggtgcgatctcggctcactgtaaccttcccctccccggttcaagcgattctcctgcctcagccccctgagtagctgggattacaggtggccgccaccacgcccagcaaatttttgtattttcgaaaagatggggtttcgccatgttggcgaggctggtctcgaactcctgaccacaggtgatccacccgcctcggcctcccaaagtgctgggattacagacgtgagccaccatgcccagcctattgcaggactattagcttccaaattacagacaaacaaaccgaggcacagagaggggcagtgacttgccccaggccacacagcaatggaagccggagacctgagcctccagcttcccttggctccacaagcaaaagctcacatgtgggaattgtgcctctgtcttgtggaggaaaacaggaggaagttcatacgcagggctcaggaatcacctggaaaagatgccggcttgtcgggggatgtgggagagagagagacaccccaaacgcgtgtccctgtccagaagatgggggtgagagatccacgagggtgccggcatgggctggggcaccccgagtgctgtcctagctccgtctgggaggggaagtcaagtcaggcttggtcagaagccacccagacatggggcgtgaggatggcttggtctggtcctggttttaggggtcccctcttaggtttccagccaccaaggagatgggtgttactttagctgggtcttggctgcctgagcagggagggcctctcagctggggtctcccctgccctcccccgagtgcaccccataaatgagtcagggttcatggaaaccttggaggttgcacctggttcatgtcaggcactcagagcattgcacagggaagaggcggctctcctggacggggactctgaggcctacaggacaatagtttcacctgcctttgctgtaggagagaacgggaaatcagtccccacgggagagtcccacagcttagagcccccctcaccctccagctgccttgaaaccaggcatggagagagggccgcctcacagtccctgacaggcctctgttctgcccccgaagggcagggaaataaaggaaccttagtcccaggttcaaatgggggaaccgaggcccagagagtgacactgggctgtggcgagtgggagactgctcttggccgggtcttctgcatcctagttccgtccacttccatcctgaaaaagcacaagcttctccctgtgccttcccgggcgggtggggtttgagacttcatgcccactgtgcctcagtttccccacctgtcaccgctccgtgcctcggtttctccatctgttgccgctctgtgcctcaatttccccatctgtcagtgaggactggggtggggctaaagcactttattagtctcacttccaaagccaagactccctggcttttctcggagccctcagagacaggcagggcagacatgggaccctgtcagcagcacccagactccccgacagaccaattccaggaggcacagtggggacccatgtcttctttcttccccggcctgagtttggggcaggagtttcccaatggcccagctttgcccactcttctcagcccccacctgtccccagctggggtctcagagcggcttccctccaccctctgccccttgctcgacccatctgtaaaatgggttcgttagcaggacccacccagctcacagggctggcctcagcgtgaaaggagggaacacacacagcgcctggaacagcgccgggaacagcatgggcgctgcagaagtgtggcctatcacatgtcactagtggcgtggaattccctcagggttggcttcccctggggaccccagcagcccctcatccctcagccctgccccctgttgctcccatgggagtaagaacaaaatctgaagtttgttattaaatcggttccatttttattggatttgaaccaaatacagcaggatgaggggtgggggtgctgaggggtcttagttcatgttgggatggggtggggggctcagggggctgggaaatcctaatatacggatgctctgtgaaccctaacctggccgagaatgcaccccctcctgtctttgataggctaaaggcacttggatatcaattctggggggcccttggggttgtcatggtaagcagagtcagacaggtgctaagaaaaaaattggttctgcccaattcaggggtggcggttggggttgcacgaacttcagccctcactcatgtcgagccccctgggccatctgtacatcgtggtgctggcctgggccctcccggccacagctcagggagaacgggctgttgtctccttccagctccttctgaaacttttgctcaaagccttcagggctgagccagctttctctctgtttctctctggctgatcgatctcagagcagtcttcagggatccaggatccaagtcaagccatcaagctcatctgcaggcctggcctctgaatacagggtaataggtttgaccctcagacccattttacagatgaggacactgatggtctaggtggtcttcagtcaccagctgagatcacatagccgggcaggagcagagctgcttttgagcccttcccgcaaagtcctggagggtctgtcctaacctcttggttggcagccaagcccctttctggctgaggttttggcccaacagtggttcctgtccctgcccccagcaatgtcctaactgtcctctggaggatgtggaggggaggggcaagaactggctgtgaggaggccaggtcacagatggtccctgtggtcccggtctggtgcctgaatccttctgcaaaacctcagctcctgcttgtttgccccccgtgacaggatgcccaccatctgcagagcaaccgggcggtgacctcagggaagctcttccttgaccagagctgcagtcggcctgtgaccccagctttggtcctggatctgccccacctctgcaggtgcagagacccagcttcctccatcaccttctcccgaggacccgggtccaggcctccctgcagggtgaagcccttgttccggccttgttcttgtcactacactgcaccgcacgtagccgggatccccgggaaccccctgtgctctttggtctcgttccccacctgagccacgggtcagcagggccggccatgatggggccacgctcagggcttgtctgaggccggctcagaggtcatgtgtacctaggggcaaaagtccctccagtagacccatttggaaggacactcagcaccccagaagccatggttctgggccggggcagggtggccacctctcccttgtggggtggccctctcttgcctgctgttctgggaagcacgtggcagcggagggaggcggagggctggggtgatggctccttcttgtggacagccctgctgggctgtggggaggacggaggacagggcgtgtggacccctgactgtgaccaccgtgtgtgctgggtcctcagcaagacctgagcccaggccccgaggtcggctgggagatgctcagctgagcaggcgctggggtgggctctgtgtcccaggtgtgagctgtgtctcagttatgcgttgtgcctgtcccaggtgtgaactgagcatgtccctggtgtgagctgtgctctcacgagagccctgcctgcctctgtggtcagctctggtgcccagggcttggttttagtgtcagctgggtgtgagggtgtgtgtctcgggtgtgagctgtgtgtgtcccagatgtgagttctgtgttctgggtgtgagctgtgtgttccagtgtgagctgagtgtgtcctgggtgtgagctgtatcccgggtgtgagctgtgtgttccactgtgagctgtccttgtatcaggtgtgagctgagtgtgtcctgcgtatgagctgtgtgtcccgggtgtgagctctgtgttccgggtgtgagctgtgtgtcccgggtgtgagctgtgtttcccgggtgtaagctgtgtgtcccgggtgtgagctgtgtgttctgggtgtgagctgtgtgtgtcctgggtgtgagctgtgtgtcccgggtgtgagttgcgcctgtcccgggtgtgagctttgctctcacgagagccctgcctgccccctgcggtcagctctggtgccccgggtctggttttagtgtcggctgggtgtgaggtgtgttgcacctgtgtgattgggttccaggtgtgagtgtgtctctgggtgtgaggtgtaggacggccaggtgtgagcaatgcagactttctgcgcaccctccccttggggctgtggggccctttgtgggacccgggtgtccaccgtctccccgatgcgatctgtgtacaaagggctgggggagcggaagcccagggcttgggggcagcagtcttgtgcctcctgggtgtgaattgcgggccctgaggatcctggggtctctgagcgcccccagccaccccgggttggtagacgggagcccatccccccatccttgcagcccgcacccccaccccccagctcagccaccatagcagggacaggaagacgggttgaaatctttagaaaacgcttgagaaactgcaaaaaagacgcatgctgatgaaaaacagtcctgcggttgggcgtctacaaaaaaaggggaagttctgcctggggagcgccgtgcagccgtccccttcccctccgggaaatgcataggtggacacgcgagcggccggcccgcgggggaggggaggggagggtccgccctggggacccctcagatcatcttcatgttgaacttgcgcgcgcctccctggcccgccgcggcggccggcccatccaccttgcggaaggagtactccaccgagaagttgtttttgtgctgcccgcggccgcggctccacacgaacagcagcacgaagcagaagaggaccacgcccaggaaggtgatgcagcccatggcggtggacaccaggatggtggtgaggtcgagcggcgcgcgcagggccgccagcgtctcgttgtgggcctcgcccggggtccggttggcggccggctcggggcgcacggtcagcgtggcgaagtaggtgtcgttgccgcccgcgttgctggccacgcacgtgtaggtgccgctgtcctgcggccgcgcgtcctggatctccagcgtccccccggggagcacgcgcgcccggcccgcgctggtggccgtcaccggccggtgctggggggtcacccaggccacggtgggcgccggctcgccctcggcgcggcagaggaagcggacgtcttcgcccgcggtggccgtgacgcgctgcagccgccgctcccggatcttgggtttgcggcacacgaagtactcgaacagcacggagtccggcaggtttcgcagcgcgtcgccgcgcacctcggccggggtggcgcaggccggcagccgcccgtcgaagttgagggtcttgcgacgctgcacgatccacagcaggcgacagtcgcaggccagcgggttcccgtccacgcgcagcgtctctagcgtgttcaccgagtggaaggtgctctcctccaacgtggagagcaggttgttggagaggttgagcaggcggatctggcgcaggcccaggaaggcctgcggctccaccacagccagcagggccccggccaggtgcagctcgcgcaggcggaccaggtcccggaacgacccccgcggcaccgtgctgatggggttgtgcgacagattgaggcaggtgaggtgcgcctggtgccgcagcgcggcggccggcacggcggtgatgttggtgtgggtgaccgacagcgaggtcaggttcaggccccgcaggctgcccgccgccacctcctccagcagcggccagttgtcaatctccaggtgcagcagcccgggcagcctgcggaagttctggtcctccagggaggcgatggccaggtggcgcagccgcagggcgcccaggctgcgcagatggcccagcgactccccggacagagccgtgaggttgcagcgctccagggtcagctcctccagggccagcagccccgcgaaggcgcggcgcgagacgaataccaggtcgttgtcgcccacttccagccggcgcaggctgtgcaggtcctggaaagtgtagtccagcaggattaccagcttgttctcgctcaggtccagcagcgtgaggttgtccaggcgcgtgaagaccccgggcgggatgagcttcagctggttgccacggagacgcaggacgcgcaggcgcggcaggttggcgaaggcgccgggctccacgtgcgcgatggcgttctcgctcaggtccagctcctccagcgcgggcagcgcggccaggtcgcccgggttcaggcagcggatgcggttgcggctgagctccagcaggcgggtctcggccgggatgccgtcgggcacggcggtcaggcggcggcgcgtgcaggccaccgcgcgggtctgcacggtgcactcgcagcgggccgggcagcctccagccgggggcggcgccgcgggcagcaggagcaggggcaggctcaggacgcacagccagcaggtcatggtgcggagcgtgggcctagggccgcgccaccatcctcctgcgcacctgcgggcgggcggggagcgggcagcgttagcaccgttagcacccctccgcggcgcctctgccgccagcccgcccctaacccgtcccagcacggcggctcgctcctgtaaacccagcattttgggaggctgagatggaagaattgcttgagttcaagagttcgagaccagcctgcacaacatagcaagactcccatctctacaaaaaaataaaagatgagccgcatgtggtggtgtaggcctgtggtcccagctactcaggaggctgaggcaggaggatggcttgggcccaggaggtggaggctgcagtgagatatgcttgtgccactgcactccagcctgggcaacacggtgagacccctgtctcttaaaaaaaaaaaaattaaaaattagctggttttcaagtaattgtgaaatattgaaaagtttacccaggcatggtggcctgcacctgtggtcccagctactcaggaggctgagccaggaggattgcttgagcccagggggttgaggccacagtgagctgtgatcgtgccactgcactccagcctgggagatagagcaaaaaaccctgtctcaaaaaaaaaaaaaaaaaaaaaaaaaagcagcattgatccaccgtgtggctgcaattccaatctcctgggtttttttgttttgttttgtttgtgtttgtttgtctgtttgagatggaggctcactctgtcatccaggctggagtgcagtggcttgatctcggctcactgaaacctccacctcccgggttcaagcaattctcctgcctcagcctcctgagtagctgggattacaggtgcccgccaccacgtccggctaatttttgtatttttagtagagacggggttttaccatattggccaggttggtctcaaactcctgacctcaggtgatccacctgcctccgcctcccaaagtgctgggattacaggtgtgagccaccgcgcccacccgctcctgggtgtctttgcataagagaatggaacacacagcgcacggaaaacctgggaacattcacagccgcatctgtaacagccaaacagtggaaaaggctggaatgtgccccaaggaatggatgggtcagcaccgtgcagccacccacacacgaacacgactcagccatgaaaaggagtgaggctctgacccaggccacggtggggatgcaccttgaggacgccatgctcagtgagagacgcgacacaaaaggccacactgtatgaccccgtttctttctttctttctttttgagacggagtcttgctctgtcacccaggctggagtgcggtggcacaatctcacctcactgcaagctctgcctcccgggttcacgccattctcctgcctcagcctcccgagtaactggggctacaggtgccagccaccacgcctggctaattttttgtgtttttagtagagacgggatttcaccgtgttagccaggatggtctcgatctcctgacctcgtgatccaccctccttggcctcccaaagtgctgggattacaggagtgagccaccgcgcctggcctttttttttttttggagacagagtctcactctggcccaggctggaatgcagtggtgcgatctcagctcactgcaagctccccctccccagggtttaagtgattctcctgcctcagcctcctgagtagctgggactacaggcacccgccaccatgcccagctaatttttgtagttttagtacagatggggttttgccatgttggccaggctggtcttgaactcctgacctcgggtaatccaccggccttggcctcccaaagtgctgggattacaggtgtgagccaccgcgcccgtccgtgtgatctcatttctatgaaatgtccaggacaggcccatccacagacagggagatgacatttgatctcagaccctgttgtaggtggaactgtgttcccgcaaatgttcaaggccgggcgcggtggctcacgcctgtaaatccagcattttgggaggccgaggtgggtggatcacctgaggtcaggagttcgagaccagcctgggcaacatggggaacccccgtctcaactaaaaatacaaaagttagcctggcgtggtggcgcgcatctatagtcctaactaggggaatctggggtgggaggatcgcttgatcccaggagttgaggcttcagtgagctgtgatcgtgccactgcgctctagccactgggcaacagagtgagactgtctcaagggaaaaaaaaaggtatgttcacgtcctgccctccgtgcctgctgtgcacgggacctcatttggaatcagggtctttacagatgtgctcagggctagatgagactgcagtggattacagtgagccttttccaacgactcctgtccttacaacaagagggagacttggacacacacctagccctatacaggggaaatagagccgtgtgaacacggaggcagaggctagggtgacacagccacaagccggggattgctgagagccccaggaagccgggagaggcaggaaggacgcgccccgggagcttccagagggcccccggccctgcggacaccttgattttggacttccgcctccggagctgggaaggcatatatttcggttgttttaaaccccccggggtttgtggcgccgtgttctggcaggaaacaggccgacccaaaagttgaacagagcccatggttttctggaggaagggtgtgtgggctgggggaacagccacggcagaggccccgaggtgtggcgggagtctggtgaagctaaaggagagagtggaggggggcggggagctgggttaggaggggcctctgggtggggggcagatgacatggagccgtggtggcccagaggaacaggcgccaatgctccgtgggtcctggtagctgtgcctcctgggctgtttccgtctctcctgggagcctgctgcacccttaccagctcttcttggctgcagccaagattctgggggctggggtggcgggtggaggtggggttggagggagcgggaggaagcagccagaactaccaggcggcattgcccagcttcttctgcttggccgcctcccccgccagccggccggctatttttggcatcttggcagctgagcccccctcggcatccccccaggccccgtggcccaaaccaggttgtgcgtctcctcacggttcccactggccttcgatcctcatttgctaaatatctgcgaaggcagctcccgcctccccagtgcctacgcgaatttaatcccagagcgaacagacgcggagccccgggagactgcttcatgtcagagatgaattgtacgtaagtgaggacagggtttgtatcttgcagctgtaattcattaagatgaggtcacgcaggagcagggagagccctaattcaatgactggcatccttataagagggaaatctggacacagagacacaggcaacggccaagtcacaacacaggcagagactggagtgattcatccacaagtcaagtgacaccagggatggccagctaccaccggaagctggaagagtcagaaagggtctccccaaaagcccccaaaggaagctggacctgcttgagcttcgacttccagactccagaactgtgagagcagcagctcctcttgcccggcgcggtggctcacgcctgtcatcccagcacttcgggaggctgaggcgggtggatcacttgaggtcaggagttcgagagcagcctaagcaacatggagaaaccctgtctctactaaaaaatacaaaaactagccgggcgtggtgatgggcgcctgtaatcccagctccttgtgaggctgagggaggagaatcgcttgaacctggcaggcggaggtggcagtgagccgagattgtgccactgcactccagcctgggcgacaagaggggaaactccgtctcaataaatacataaataaataaggtgaaacgccaaactgaattctggatttaggtggacaggacacatatgtacagatgccaaaactgggcattcacatgccacgtggaacagcacagagtgtggtggaaaggaaggtgtcgcaggtgagaatgtggtcccaccgagagaaaagcgaggggcccctggttcccaggaggccttggtcctcctgcccccagcttgggaacataggaaactcgagggagggaggaagggagggagcgagagagggggcatgccccccccaaccccggaatcatccttaatcccaacctgggcatgttacagggaaggcaatccttccctcccagcaagctccctcccagcactgtttttctgggtcattctctcccgagctgctgccctgccgacagcacactcaggggctgtgtcacgggaggggacaagagtgctagggcggtgatggcacttttatctgccccccgaccctgcacctccccccttactgtccgctccacagtgtttacaaaaccactggtgaaaacctgcccacagcccaggtgtggcggctcacacctgtaatcccagcccacaggccgggcgcggtggttcacgcctgtcatcccagaactttgggaggccaaggcggggggatcactggagcccaggaggtccaggatgcagtgagctgagatcgcgccgctgcactctagcttgggcaacagagcgagactctgtcttttggttcttttttttttgagttagggtctcactctgtcgcctgggctggaatgcaatggcatgatctcagctcactgcaacctccacctcctgggttcaggtgattatcctgcctcagcctcccaagtagctggggttacaggtgcccactaccacacccggctaatttttgtatttttagtagagacggggtttcaccatgtgggccaggttggtttcgaactccacttcaaatgatccacccacctcggcctctcaaagtgctgggattacaggtgtgagccaccgtgcccagctgcaagaccctgtttttaaaaaagaagaataggccgggcatggtggctcacacctgtaatcccagcactttgggaggccgaggcgggcagatcacaaggtcaggagatcgagaccatcctggctaacatggtgaaaccccgtctctactaaaaaaacatacaaaaaattagccgggcgtggtggcgggcgcccgtagtcccagctactcgggaggctgaggcaggagaatggcgtgaacccgggaggcggagcttgcagtgagctgagatcacgccactgcactccaacctgggcgacagagcgagactccgtctcaaaaaaaaataaaaaagaagaagaataaagtaaacctacccacagctctcaggcgagaaacatccatctgttggcctgcaagaccctacagcaagcagccctcacccccaccctagactcatccagatactgcaaaagctctttcctctcagtgcagacccctcaccctgctctgctcccccaggacccgggcatgcaccctccctcccccccttttttttttttttttctgagacagagtctcgctctgtcgcccaggctggagtgcagtggcatgatctctgttcactgcaacctccgcctcccaggttcacgccattctcctgcttcagcctcccgaggagctgggactacaggtgcccgccaccacgcccggctaatttttgtatttttagtagagacgggatttcaccacgttggccaggatggtctcgatctcctgacctcgtgatccacctgcctcagcttcccaaagtgctgggattacaggcataagccaccgcacccggcctttttttttttttttttttgaaatggagcttcattctttttgtccaggctggagtgcaatggcacgatctcaacttactgcaacctctgcctcccgagtttaagtgattctcctgtctcagcctaccaagtagctgggattacaggcatacgccaccacgcccagctaatttttgtatttttagtagcgatggggtttcaccatgttagccaggctggtctcaaactcctaacctcaagtgatccacccgcctcggcctcccaaagtgctggaattacagtgtgagccaccgcgcctggcctgtttgttttttgagacaaggtcttgctctgtcgcccagtctggaatggcaggatctcctgggaggcctttgccttccagcttcaagcgattctcctgcctcagcctcctgagtagctgggactacaggcgcccgccaccacatccagcttatttttgtatttttagtagagatggggtttcatcatgttagccaggctggtctcaaactcctgggctcaagtgatctgcctgcctcagcctcctaaagtgctgagattataggtgtgagccactgggcctggtccattttctaaattagaggtttctttttaagttggaatttatttatttatttatttatttagagacaggttcttgctctgttgcccaggttggagtgcagtggtgtgatctcggctcactgcagcctccacctccccagctcaagcgatcctcccacctcagcctctcaagtagctgggattataggcaagtgccagcacacctggttaattttttcatttttttgtagagatagggtctcactctattgcccaggctggtctcgaactcctgggctgaagtgatccacctgccttggcctccgaaggtgccgggaacacaggcatgagccaccgtgctgggccaataattttttttttttttttttttttgacatagagtcttgctctgtcatccaggctggagtgcagtggtgtgatctcagctcactgcaacctctgcctcctgggttcaagagattctgctgtctcagcctcccgagtagctgggattacaagcacgcaccaccaggtctggctaatttttgtatttttagtagagatgggatttcaccatgttggtcaggctggtctcgaactcctgacctcgtgatccgcccacctcggcctctcaaagtgctgggattacaggcgtgagccaccgcacccggcccaagaaattttttttaaagcagttcccatagagcacagataagggcaaaatcaggaagtttcctggagagatgacaggtctggaatcgctaggtcacagtcacactgatccagtggcagaagtgcctgcgggaggcctcaattcggatgcgctgtgtgacctctgttgagaaacctaccctctctggacctcgcctgtcacggtataggtacaagagccctccggggcaccctccaagctctggctctataattactcctgggatgagaggacagctgatccctcgcgcccagcaggggccactcaagctgtgacctagttttacaaccctgactcccccactcgacggcctggccctgtcatttcctctgcagggtgctgccggggaggcaggaggggggatctggcagctggactcaggcttctgacatgtcccctaagggtctggtgttccccaacttgggaggaagaactggttcctggagaggggacatgggagactcgattctgtgtacacggcctgcatctgctcaccatgtgccctgaatgcatccggttgtcctccctggtctcttattttttattttattttattttttttttgagatggagtctcgctctgtcgcccaggctggagtgcagtggtgcgatctcggctcactgcaagctccacctcccatgttcaagcaattctcctgcctcagcctgccgagtagctgggactgcaggcgcccaccactatgcccggctaatttttttgtatttttagtagagacggggtttcactgtgttagccaggatggtctcgatctcctgacctggtgatccgcccgcctctgcctcccaaagtgctgggattacaggcgtgagccactgtgccctgccttttttttttttttttttgagacggagtcttgctgtgacgcccaggctggagtgcagtggtgcgatctcggctcactgcaagcttcgccccctgggttcatgccattctcctgcctcagcctaccaagtagctgggactacaggcgcccgccaccacgcccggctaattttttgtatttttagcagagatggggtttcaccgtgttagccaggatggtcttactctcctgatctcgtgatccaccggcctcggcctcccaaagtgctgggattaccggggtgaaccacatgcctggcctcttttttttttttttttttttttattgagtcggagtctcactctgtcacccaggctgagagtgcaatggcgcgatctctgctcaccgcagccttcgcctcccgggttcaagggagtctcctgcctcagcctcctgagtagctgggattaaaggtgcatgccaccacacctggctcatttttgtagttttagtagagacggggtttcaccttgttggccaggctggtctcgaactcctgacctcaggtgatccacctgcctcagcctcccaaggtgctaggatgacaggtatgagccactgcgcccggccccaggctgattctttaggggcctctgtcccctcccttgtcctcatgctgtggtcctgggggaaggcgacactttcagggctctctatctccatcctcatcggtccctcggaccacccccctcccaggaagctgccacccacctggggcattacctcccatcctcccaggatgggaacaccatctgctcacagatacctcctgatggtgtgtcccagccacctgaactgcagcccagggacccagccccatccctgacctctcccagggcgacccacagaaccccagcgtaaccccggccacgcggagccaaccccagctccacccttcctctcccacaggccagagtcctccctcgctctgggcctcccgccactgccaggcctccgtcccccaccccgaactcccctccttccagccgggctccagttcgcccccaacattcaacgcgctcctcctgttctggcattggtgtccccagctgccaaatggaactggagtagggggaggatcaggccagcccctgcaaaccgcggtctccccaggctctgtgaacactggggcctggtcgttctctggggtggggccgtcctgggcactgcagggtgctgagaagcgtccctggcctccacccactccatgccagggacaccacagatgtccccagactttaccaaatgtcccctgggagcagaatcaccctggttcagaccctctgggttaggggattccacagacccccaagagactctgcatcccacaatcctcagccctgctgaggtcccaggaggctgtgcacgttgaaatccacgccctgagtgggagggagagaggaggtgaatcccaggagctggggacccctggtttacaccgtctgccgggtcaggagttgatcctggtgtctggtgtgagcaggggacagatttagtgtttttttttttaatttaaataattaatgcaggtctctctttcttggccccatggacatcttatgtggatgactctctgtcttgggcactgccgggtgctgagaagcgtccctggcctctacccactccaagccaggagcacccccttcccagtcgtgacaggcacaaatgtccctggacacggcccagagtccccggcggggcagaacctccctgagtgggtccttgctgtagaggacgctggcacacagtgcgcctccagttcatgccccaggaggagccagggtgattcagcctgttttacacggggaggcggagacccagagacggacggcgacgtgctcagggccacacagcagagaggaagcaggtacaagacgcgaccccggggctgggtgcggtggctcacgcgtcatcccagcactttgggaggccgaggagggcggatcacaagttcaagagatggagaccatcctggttaacatggtgaaaccccgtctctactaaaaaatacaaaaaattagccgggcatggtggcgggcacctgtagtcccagctacttgggaggctgaggcaggagaatggcgtgaacccggaaggtggaggttgcagtgagctgagatcgcgccactgcactccagcctgggcgacagagcgagactccatctcaaaaaaaaaaaaaaaaaaaagaggaaaagaaaagaaaatgtaccagttgcccttcgatgaactggaaacacaacagagaacagaggccagaaagtccctgttcttttatttttatttatttatttgtgggtagtttttttttttttttttttttgagacagtctcactctgtcatccaggctggagtgcaatggttcaatctaggctcactgcaacctctgcctcccgggttaaagcgattctcctgcctcagtctcctgagtagctgggattacagacatgcgccactacgcccagctaatttttggatttttagtagagacagggttttgccatgtgcccaggatggtctcgaactcctgacctcaggtgatcagcccgccccagcctcccaaagtgctgggatgacaggccctgagccacaatgcccggccccctgtccttaaggagcttacattctggtgcgggtgacaccgtgaaatcagtgtacgggacatcagctggtaataaacgtcacggaggtcagaacagctgtgtcctcgggtgacgtcacctcctcggctctgcgccccgccgtccacaggcgcgaagccggagctggggttggcgaccgagaaccttcctgcctcccctccccagcaaggggcacgtcccaccaggcccggactgcccgtctgcccctgcagggcccctcgctctggtggcgggctcggtgagctctgctgcccggtctcgggagtctgggggagcgcggcgtcgacccctgtggagggaggactcgtgtttcaaggacagagcctcattaccatgcacgaccagccgcagctgaggccgcagaggcctttggcaggggggccgggccggcggcagggacggcgttggcggtggtggacgggagtgggggtctgtcctgaacaggtgggggtggtccctgtgctggcccccgccatgcgatcgcaccccaggactctcctcctcttcctaagccccagcatgtgcctggtgccgcgcgggtgctggaggcacagcggcttccacgcagacgcccgcagcaccacagcctgtgcacggcgcatccacgccctgttacaaatgttccattcaacgccttctagcacattcacagatcgtccgcccgcacctctagttccagaacattccatcacccccaaaaggaagccccgtccccttcagcagtcactcccagcccctccccagcccggacccccacccatctgcttcctgtctctgcgaattggcccgtctggacatctcgcatcaatgcaatcggactggctgtggcccccagggactggcgtctttcccccagcgtcaaggtgggggcacaaacaggtgagaatcgtgcagcccagctaatgagcagattgtctgaaaaaagcgctgaggagcggagctagcagggagctgtgggggggggggtctgttccgggctgtggctgtgtttgacgggcccagggaagaccctgtctgagctgagacctggatggggagccggggtcagcagggtacagctaagcgaggggcgaggctggccgggggtgtgtctgcgcttgcgggggtgggagccctagctggcaacggcaaaaccacacggggcactgaacccccagggaggtgtccggacttgcatccacaggcaatggggagccatgggaggatatggagcaagagcatggcgagatctgggttgcagttggaaggcgcgtccagctctgcgtggtccgaccccaggtcgccctgcctcacccaaacctggaaagtcttgactctcggctgcacctccatctccagagagcagggcactattatctccctctccacccggttacccacacgcagagctgtggccaatgatggagcatggggaggctgaactggacaccaggtgctgaatcaatggccccttgtccactccagagccaggacaagaactcacgggtcctcacctgaatcggccactgactgccttgggcagagacatcgaagtctctgagcctcagtttcctcttctgcaaaagggaactgcagggttcccagtcacttccctgggctgagcgagtgagaagtcaggcaaggaggttccttccggggaagtctccattgggtgccggctggggtcaggagcccagagtcctaggccctggtttgctcctggccatgtgttcacctcattcattcattcaacaaacattcattcaacaagcattcattcattcattcaacaagcacttaaaaacaatgcctgtgtgccaggcactggttttaagagaaacagcagtgaacaaaacagacaaatccctgctttctgtctatgggcaagaaacagaagaaacaagtaaagccgactgtcacatggcaggccatggtatgggaaaaaataaacagggaaggggggcctggggttggcagaatggggttggcagaatgaaggcctccccacagccagccggttctaatccccggaactgcagataaggccacccttacatggaaaaagggcctctgcagatgggattaagtaagaattgtgagatcaggagatcattccggatcatccagaggcccaacatctcacagggtcctcacgagaggaggcgggagggtgaaagtcagagactggaagaggctgtgctgaggctatgaagggatagggtggggccctgagccaagggatgcgggtgcctctgggcaatgggaaagatgggaaccggattttcacctggaatgcgcagcaggagggcccagccttggccatgtcctgctttttttttttttttttttttttttgagacagagtctcgctctgtcacccaggctggtgcgatcttggctcactgcaacctctgcctcccaggttcaagtgattctcctgtctcagcctcctgagaagctggaactacaggcatgagccaccacgtccggctaattttttgtattttcagtagagatggggtttcaccatgttggccaggctggtctcgaactcctgatctccagtgatctgcctgcctcggccttccaaaatgctcagactacaagcgtgagccaccacacccagcctcatgccctggttttacgccagtgaggcccattttggactctggcctccagaacggtgcaataataaatgtgtgtggttcccagccactgctgtcacagcagccagaactcatcagggtcattgcagtcttgaagagggaggtcgctcgaggcctcccggatctgtgcacctgccttctggggcgtggaaggcaggggacattgacctctccttggggtctgagatctgcaccaaccacggtgcaggcaccggccttgaggaccccctccccaaaactgtcccccacagcaggacctgggcaatggaggcctctcttccctgtacccccagctgtccttagatatggatcctggattaatggtcctggaagctcttagctcaaggagaaggcagagtgtggctgtgagtggccggggtccctccctagaacagaggtggccctaccctcttggtgcctggtggtgtgggcagctccttccctcagctcctggctaagcccccggcccttccaatccgcctcctctattctgagcagggctcttcccctccctcttgcaaggttacctcaaacacatccccctccagtccccgcccagggcaagggatgctgacatctcccttgggaaaggccctcctagaggccggccaaacccagagggggcaggagtgagaagtgtggtagcggtcccctctgtttccaggcccacagtgacctccatctccctccctctgccccccaccacaaccagggcggtgggagtaaggggagtgtgctctggatgccccgtttgagcttctaagacggatatgggaggagggggcccagcccctcacagcacgtggccctccaaggtctgcttttggggacacgctgccagtcccccaggacccctgcatcctctgccctagatccaggccctcccggggcttcatccatgacaattcattaagccctaattagcttccatctgctgttagtccccgtcaacccctcgaggggctgggggcctcccgacccactttccttcccagcctgtacacggggggccgtggactgccctctgcaggcagggcctctggatctggaaccagttttggagcacccactgtctacaccggccacttcacccactagcccagccctgactagggggaataataaagttcgttttggagagaaggagactgagggtcagagtgggccccagctcactgcacaacttagctgcagacagtcagcatttgaacctggatctgacgccagctcctacccacaaaatcccagctccccactagagggtgaagggcgctctttggaggcccgagattgacatgtggtggtgggcggcttgatggggcccacccggggccaactttgctcgcagagttcttcaagaggctctacctggtgacgaggtagtgactcagggggcgccggggaatgacagtgctgtgggaagagacatcaaactgccttctattcccactcagcaaggcaccttcaggtcccggcttaccctgggggtggacggctgaggctgagggaggccaggcagggctgctgccgtaaccatcgtgacctgagcatctgttttatggtggcaccacactgcagccgaggtgggcagcatctcatttaatcccatgtggggtggatctgagagaggggacgtcatttgccggaagtcaccggtgaagaccagacaggcagggcagggaaggctgagttgaaccctcctaagcccccatcccaccgcccggctgcccccttcctgccaccccacatcatcgagatggggacaggagctgggtctacaggggaagcccgtgggttcttcccactcagatcctgtctccgacgatggctgctgcttcggctcagagaacagccagggtaaggccatgccgcggcagcccaccccacaccagcctcctgataaagccagcaccaccctccctgaacctgtttccagcctgcgtcctccacctgaccactcacacctcacaccttctgcatcctctccaggccacttccagggagccctcctgggttgctctggttctcacagctctgttgtccctgaaggctccccccagccaagccccagatcgtccctctgcaaataccactgcacagcagacgcccgctccccacccccgccggagcaagggtgtctgcagcctcgctgcgtccatggtttagccagggaccgcttgctaaaatgcagcttctggggcacatcgcctcagaagttctgactcctcagaactgggggggccgggacaccggcaccgttagcgccccaagcacacgttgagaaacccagttacatggtggtctccagcgtaaggacccggggcttttcttgtgcccggaccaaggcacgaggtgctgctcccctaaacttgttgaatgggactcagggcctcccctggccaggccccagaggcccgggaggtggcggcacccactcagggtgcccaggcccaccatttctggtgctattcagacgcccccagagcagggggactcagccctatgcccccaggtccctccccgccaggccgggccgtcagctccagcgatggagcaggctccggtgtggaccccagataccctttgcgtcttccagctccgcacccccaggctggaccagacccggctcgggggagacagggcaggaaggcgcgggctgcaggctctattcggacgttccccacaccccagacccaaccagtgcccccttcatctcctcctggagaggagcgcatcctcccagcgtccccagtgccccggggagatgcccacccgattccccgctccttggcgccccagaggaggggcggggggccccagggtggggagttcgcccccaaagtttccagggggagcgtcgggggcctggcaaggagcgatgagcccgggaggggtgcgcggggcaatttcccccggctgaggatggggtcgcgggttgggggctttgggcggcagggtcgcagggtgcaggtgaggggtccccaggtctgcgggcgcgccccacgccgggccccggcacggccactcacctgggcggctccgccgcggacacggcgcgggctgcggcgcgggggccgcccggagccgacacgagcagccgccgccgccgccgccgccgccgccgccgcctcccgggctccgccgtgcgcgccgccgccgcgcgcaaccgcccgccggtctcctcggcgcgcctggcgggggcgcgcgggggctgcgctgggccgcgtgcgcggcggctggggccgcaggtgtgagaggccacgtgggcgcaggtgcggggacactgggagcgcgggtgcagaacccctccgtgcgcatcccgggcgcttcgtgtccgaggacctcctgtccccacggcctgggtgagcctgcggagacggccgtgccgtgcaataaacgcaggggcaccccaagtgcagcaggttgttccgtgtggaaccttctggaagctaccatcgcctcctctgccccccgtcccccacccctagtccaggccgccaccatctgcacctggacatctgccacagcccagcccaggcccattccttatgtggccctcagaggaagcccctcagaggaagcttagccactgggctccagaacctgccgtgattccctattgccgtgagggtcccgtctgcaccccacctaccctggaatttctctttctttcgttctttctttctttctttctttctttttttttttgagatggagtcttgctctgttgcccaggctggagtacagcggtgccatcttggctcactgcaacctccgcctcctgggttcaagcgattctcctgcctcagcctcccaagtagctgggattacaggcacccgccaccacgcccggctaatttttgtatttttattagagacggattttcagcatgttggccaggctggtctcaaacccctgacctcgggtgatccacccacctcggcctcccaaagtgctgggatgacaggtgtgagccaccgcccggctgcctgcactgtttggtctgccgcaccacctccttccccctggcctgtcctcactcactctttcccgggctccaccccctcagccttcctcaaacaggccaagtccctccagtcccaggcctttgatcttcgctgtgcccagcttggacagcctttctctctgtccctccatcgagcagcttggagcctctcagtttgtctaatgggcttgttccccaatgtgccttccgcctagcacacagcagcgcacacaccaagtgcactgcgagtgctcatggaaagttttttacctttttttttgtcttttttttttttttttttttttgaaatggagttttgctctcgtcacccattctggagtgcagtggtgcaatcttggctcactgcaacttccacctcccgggttcaggcgattctcctgtctcagtctcccaagtagctgggattacaggcgcccatgaccatgcctggctaatttttgtatttttaggggagatagagtttcaccatgttggccaggctggtctcgaactcctgacctcaggtgatccacccgcctcggcctcccaaagtgctgggatgacagacgtgagctactatgcccggcccctcactgcatcttctaaaagccacatttagcctccctgtctcacagatgagcaaaccaaggctgggagatgccatttgtcccaagtgaggggtgagaaggaggcctcgggaacctgtgtgtgtaaccttgccctgtctgcccccttcacccactctgcagtcctccccaccagctgtgtattcccagtggctttggcggtggcctggcactcacgcagccacctgtgactcaagcaggctctgttcccagactgtcgcgttggctggaggcccagaaaccgcatccctgggaggctgcaggccaggccccccacaggatgctgtggggggcgggtatggttcaattcctggccccagagaggtccagaaggacttcatgacaccccatgctctccccaccaaatggccctgggctgctgtgctgtgtgaccccagtaggggaggtctccttctctctctgaacgtgtttctttctctgtaaagtgatgctcctgatagctggctctcagggctcttggaggaaggtgttcattgagcacctactgtataccaggccaagggctggagggaggaggaggagacgcttccagcctcaagggggatttcttcggacagagggagcagatgcctgaaatatgaaatcgtcacaaagcggcgtggaagaggcagtagtgacaccgggtcccggaccgaagccaggggccagggaggcttcccggaggaggagacacttgctatgagtcctggagggtgagggatgccagctggggtccagtcgaggccctgcctgtgtaaccgtgggggatgtccctctagcctcggtctccacctctgcaaaatggagatcggaacagttcccatcttctcccggggctgcagagactctgcagtggttctgcccggtttgtggccagtgctcccgagcccttgggggtggagattgggccaggctcctactgcagggcctgagcacgggctgctccctctgcctagaacgcccttcccccagacctctgcccgcccctttccccctcttcactcgcgtctccaccccgaccttccatctctccctgcgtggcacatgcctgctaagatgtccagtaatttgctgatgggtccagtgcaagctctaccctctcttcttttttttttttttttttgagatggagtctcaccctgtcggttgcccaggctggagtgcagtggcgcgatctcggctcactgcaagccccaccgcccgggttcacgccattctcctgactcagcctcccgagtagctgggaccacaggcacccgccaccaggcccggctaatttttttttgtatttttagtagagacagggtttcaccatgttagccaggatggtgtcaatctcctgacctcatgatcggcccgcctcagcctcccaaagtgctgggattacaggcgtgagccaccgagcccggccccagccttttttaagacagggtttcgctctgtcacccaggctggagtgcagtggcgcagtcatagctcactgcagccttgaaccccctgggctcaagtgatcctcctaccccagcctcccgagaagctgggactgcaagtgagtggcaacacacctggctaatttttttattttttgtagagatggggtctcactaagttgcccaggctggtcttgaactcctggcctaatgtgatcttctcttcttggcctccccaagtgctagtattacgggtgtgagccactgtgcccagcccagtcttgtaatattatgtgtccatttactcctccccaaaatgatgagggattagtttttattattattttttaagagacagggtctcattctgtcacccaggctggagtgcagtggtgtgatcatggctcactgcagcctggaactcctgggctgaagtggtcctcctgcctcagcctcccaagtagctgggactacaggcatgtgccaccacacctggcttttttaaattagctttttttatatcttgtgagacagagtttcactctgtttgcccaggctggagtgcagcggtgcaaatcttggctcactgcaacctccacctcctgggttcaagcaattctcctgcctcagcctcccgagtagctgagactacaggcgcatgccaccaggctcattaaatttttgtatttttagtagagatggggtttctccatgttggccaggctggactagaactcctgacctcaagtgatccgctcacctcggccccccaatgtgctgggattacaggcatgagccactgagcctgggtcagattaactttttttttttttttttttttttgagacggagtctcactctatcgcccaggctggagtgcagtggcgcgatctcagctcactgcaagctccgcctcccgggttcacgccattctcctgcctcagccttccaagtagctgggaccacaggcgcctgccaccacgcccagctaatttttttgtatttttagtagagacggggtttcgccatgttagccaggatggtctcaatctcctgacctcgtgatctgcccgccttggcttcccaaagtgctgggatcaccggcgtgagccacggtgcccggcccccagattaacttttaattaacagggtcttgctattttgcccaggctggagtgcagtggtgcaatcatagctcactgcagtcctgaactggcctcaagtgatcctcccatctcagcctcccaaagtgctgggattacatgtgtgagccactgtgcctggcctggattcattattattcccactttacagatgagaatttggggactcagagaggttaggtcactagcctcaggtcacacagcatctgcctgctgaagctggggcttgacctcaggcatctggagcccaaggcttccaggactctacacgtttgcctcttagcagccaaggactctttccccagttacagagggtggccacttgtctggggccacacgggaggctcccaggccacctgcccccgcagcctccctccctgggacatgactgccactcccgcccgcatctggtcccgtccctcacgctggagagagcgagcgagaggaggagggcttttaattttagaaatggttcctgctgcagaagagttcctgctggttttcccaggcaggagagcacaggacaggagacccctcggccccaccacggccgtccccagaaggatgcccccctctgcgggctgctgcctccctgccccccagcctctcccacggcttccccatctggagccgccctctccgcccaggtggtaagtctccatggcaacgtcccatcacaggtggtcgtaaccttagcaaccaggtgctcccaccccaccgcctgggaggctcaaagccgcgcctgcatccccctcccacgctctccctgcccccgccccccgggcagctctccaagaggaaccgagggagatgcatcctgccagggatgctgggcccagagacttgagggacaccccaagatcacccagcagctgagctgctgggcctggggtgctccacgggacatcaaacccacctccctcgtcctgcaggatgcaaaagaaactgcacttctcgacatcgcctgggctcctactaggtgctgcgtccatgccaggctcaggcgccgtccctgccctcaggaggcttccactcaggacaaggggtggggagacactgaccgaggacaggaaggggacaatggccgggcgtagtggctcgtgcctggaatcccagcactttgggagggagaggcaggaggatcgcttgagctcaggagtctgggcaacatagcgagaccctcatctctttaaaaaaaaaattatctggacatggtgttgcatgcctgtagccccagctactcaggaggctgaggtgggaggatcgcttgaggctaggaggaggagattgcagtgagccaggatctcaccactgcattccattctgggcgactgagcaagaccctgtctcaaaaaatatatatgcatattggccaagtgcgctggctcacaccagtaatcccagcactttgggaggccaaggcaggtggatcggttgacgtcaagagtttgagaccagcttggccaacacgatgaaaatacaaaaattagctgtccccacaaataagtgacccccagagtaagttctaggtttagaatgaaatttatccatctactattaaaaaaaaattctctcagccaggcgcagtggccgagaaaaaaaaaaaacacaactctcctctgatttacatggaaattaatcacccacatcagattctgaaggaaactcttgcttatattacttttttttttttttgaggcagagtctcactctgtcgcccaggctggagtgcagtggcgcgatctcggctcattgcaacccccgcctcctgggttcaagcaattctcctgcctcagcctcctgagtagctaggattacaggtgtgcaccaacacgcccagctaatttttgtatttttagtagagacggggtttcaccatgttggccaggatggtatcgaactcctgacgtcgtgatctaccctcctcagccttccaaagtgctgagattacaggcgtgagccacagcgcctggcttaaccttttattatggaaaattttatacacaaacaaaggcttagagaatcacgtaatgaacccccataaagccatccccaaagtgtgatgcatctggttccataagtccctctccaccctccccaacagactatatcaaagcaaatcccagacacgaagtaatttcatccataaatatttgcatttctaaaatacaatgacttaaaaaacacagccaacaattccattatcattttttaagaaaatggacagtaattccttaatatgctcaaatatccaggcagtgtccagtttccctgactgccttctaaaattttttcacactttgttcagctcagaatccaaataaggtccatttactgcaattggttgatatgcctgtctctttctctctctctctctctctctctcttttttttttccagagacagggtctcgctttgtcacccaggctggaatgcagtggtgcagtcatagctcactgtagccttcaactcccaggctcaggtgacccccacccccgtctcagcctcctgagtagccaggaccacaggtgcatgccagcatgcccattaattttttctttttttggtagaaacagggtcttgccatgttgccccggctggttttgaactcctgggtttaagtgatcctcctgcctcagcttcccaaagtgctgggattacaggcatgagctgctgaaccactgtgcctggccttagttcttcctttctgctgtttgtcttatatgtcattttcctgtcttattgcaccgtgtggcacctccagtacaatgttgaaaagaaccagtggaactggacatctttcttttgtttctggccttagggggagagcacccagtccttcgccattgaggatgacagctgtagggtttttatagacatcttttatctggttgaggatatgccattctattcctagttgcgtgtttttaatctgcatgaatgctgaattttgtccaagtgagtgctgaattttctgcatctactgagatgatcatatggttttcctctcttatgctaatgtggttaatcacattgattcttgggtattaaaccaaccttgcattcctgggataaaccccacttggtggtcatgatggagaatcccttttatagacagctggattcaatttgttaatattaaggatttgtgcatcgatattcatgagggatattggcctttgattttcagtaatgtgttttggttacgctggcctcataaaacacattgggaagtgttccttcctcctctagtttctgaaagagtttgggtaggattggtgctgtttgttccttaaaagcttcaggatcaattctgttgttttccagagaagggggtctctctatgttgcccaggctggccttgaactcttgggctcaagccatcctcctgcctcggcctcccaaagcactgggatttcaggcgtgagccaccgtgcctggcctgggaacaattctgaaggtagaattgtcagcatttgctgatggctgggatgtgggaggcaagagaaacagcagggaagggcacccgagggtgtaagcctgaatcatggagctgtttccttggatgcagaaagctggagcggcacctggtggaaggagcattggtttggggtgtgcattaattttggggcgcctctggtgctggggcagagatgaggtcagggaaatggaagtcagaagcattttcaacaatgaaagcggaacccacgggcatctctgtctctgacttcgtgcccattacccccagcttcctgttcccttactgcttctggtctgtgttcactggccggcgtgcagaactctgtcttctgtcgggcactggaaccctagcggcctcgggcccgtcattcctgggtgaatcctgacccctgctggctctggtcagcacggtcgaggccagcgtggccacgcagtggcggtggggggcgggggtccacggagctgagtcctgaagggaggtagagagtgtgagacactggaggcagaagggcccggagttcatagacagacctaggcctgcccggaaagcccctgtctaatgggcaaggcggaggagcccggacttattcctgtggacaatgggggctttggggaggcgcagagtgggagggacctggtgagatcccaggagcttgagccctagccgtggagctgggacccccaggactgtcctttttattttaagacagggtctcgctctgtcacccaagctgcagtgaggtggcggaatcatagatcactgcagccttggcctcctaggctcaagagatcctcccacctcctcctccctaagtgctgggattacaagtgtgagccacagtgcctggccccaggggtgtgctaacctctctcaccctgggcggtccccaggctcaaaccaacaattcctgaaccctaggagctctcctcgtgggcacagcttcttctgtttacaaaccttcttcccttcatatccatgtccttgtctgggtccaggcaggaaatcgacacccagaaacaggcggtgatgggcagcaggggcctctgtggcagaaggtctcacgctacacggtactgtccgggtccttgcacgggtgttctggaggtgcagggaggcctcccctcggtcgttcaaggcaggaatggatctgcggcgtgaggccgacggtgacttgctttctcccagctcctggggccacagtgcgttcattcccctcccctcccctccactcccctcccctcccttcccctctcctccactctcctttcctctcctttcctttccttctttttttgagatggagtctcactctgtcacccaggctggagtgcaatggcgtgatctcagctccttgcaacctccatctcctgggttcaagggattcttccgcctcagcctcctgagtagctgggattacaggcacccgctgccacgcccagctaatttttgtacttttagtagagatggggtttcgctatgttggccaggctgctctccaactccttacctcaagtgatccgcccgcctcggcctcccaaagtgttgggattacaggcgtgagccaccgcacccggtctcattcccttttctctttgcctcttttaggcactgggacttcatttctatgcccacaagatgcgggtggctgggagccccattggcttggggcagaggaaaggcacggtggggtagatggagcggcaggcagcctacctcctacgctaggattctggctgtgttaccctgtgcaagctgcttaacctctctgggcctcagctgcctcatctgtgaacgggaatgacaaaaggacccgcctgaggtcctcctttgggggagggttccgtgaaccagagctaccttggagaaggcagtggggtcagtgtctggggcagacgccccagactgactatcagtaacatccagctcccgtcctccttcggaacctgcagtggggtggtaccctgaggatctctggctggtctgggggcaagaagggcccatctgtcttatctaccagggcctccgccaatgtctcccagagtggggcctccgaggacaagactcgagggctctcggccagcacttgaccgcgggcacaggcagcaaagctggttcccgggccaacggccacggccccgacatcgtgatccgagggctgcgctgaccatgggcagggagttgaaagggtgaggtctgggccaggggcagggggcagcctgcagttggcacggcgggctggctggcgggacctgctggggctggggctttatacggggccaggagagtggaggcctgggggatccagtgtctcgggccgggccggccgccgtgtcctcatttctctctcggttccctctctacgtctccgcctctgtttctgcctctccctatctctctccaaatctctctgtgccttctggctgtaactgggtttttcttctctgactctttgtaaaatattaaattttcaatgtaatgtggaatgtaaaatattaaatttctccttttaaaatattaaaagcaggccaggtgcagtggtgcgcacctgtcatcccagcactttgggaagccaaggtgggaggatttcttgagcccaggaggtcaaggctgcagtgagctgtgctcacaccacagcactctggcctgggccacagagtgagaccttgtctcttaaaaataaatacatagataaaattaaaagtggctttgtagttggctggaggtcctggactcctccagcgtatcctctagtgatgggcagctgggttacttccagtcttttccgagcaggtcagagtggctctctggggtggaaatggttgagaggaacaggctcattctggtctattctctggggacttctgtctgcctccccaggaagttgacctctccctctcccggtctgcacagccttctgtttttgtctgtgggcctcatttcaaagcttcgtgccctgggctgggcatggtggctcatgcctgtaatcccagcactttgggaggctgaggcaggaggatcacctgaggtcaggagctcgagatcagcctggccaacatggtgaaaccccatttctactaaaaatacatagccaggcatggtggcgggcacctgtaatcccagctacttaggaggctgaggtgagagaatcacttgaacccaggaggcggaggttgcagtgagctgagatcgtgccactacactccagcctgggcaataaagtcagactccattgcaaaaaaaaaaaaaaaaaaaaaaaaagcttcgtgctctgaactctgtccccacatgactgtggccgagggcccagccacagagtggatactcaacacctttttcaacacttcagagagaaggaattggatttcagagaggttgggacaccttccctaagccacacagcatgtggtggggggagccttgggctcagggctttgtggctgcagagggctttgcaaagttcatcagctcactaggaggtgacggagtgggcagagagcagtctacagtgtggggggctgttctgaggggtgcagcggtgaggcaggccttgcttcctctgcgggagaaaccgtggggctggaaaacgggacttccttcctctcctgcctccctgccgttcctggaggttctaacgaggccagttagcctctaaggccttgacacgttctcccactgggggttgaggcctctgggccactgggaccctgggtttcagcctttgcatctggctcagacagggcaggcaggtgtgccgcgtggacagcgtgttggtttccaggccggtcagctctggtgtcagggttgtgtttctccatcacgtgacatcctgatcccccacctgtcaaatggacgcagggaactggtcccggacagcgaggcttgtaggcttgtgggttgaacgtcagcagtccgggcacacctgaactctgtctgtccttcgctggaggctgtgaccccgcagctatcccagcaaacccccgccatccccggtgcgaggctggaggctggggcttgggatgaggtctcggccggtggtggcagggctgggctaggtggccggggccggggagggatgaacagcggatgcaggggttggccacgaggtccgataactaattccccagccacaggggctagtgccgctgggccccagcaaagccagtgtctatggggcccagatacccctgccgagaagccagctggttccacttattcggaggcagccagggagcgtgagcccatccagacccgaggctgagctccgtcctgttctgctgctatagcttcctggcaacctggaccacacgctgcctcggtttcccgagctggggatgaaggggttagcggccaggatgaccctctcacgctcaggtcataagggacagcctatcctctctcaacccgagtgatgaatcagacaggccctgccctcctctgggaagacagtgcctgggggacagaggtgcaaccaggaaacggagtccaggaggattgcccggctgtcgggaagagacatttaggggtatgcaggatgggctggcccgctggagtgtgggaagtcctagtgcaggtgtgggaggccggtgccagggcctgtatctgcccagtcaggacacgtttttaacattttttgtaggccaggtgtggtggctcatgcctgtaatcccagcaattggggagggtgaggagggtgatcactcgaggtcaggagttcaaaaccagcctggccaacatggtgaaaccccatctctactaaaaatacaaaaattaggccgggcgcggtggctcacgcctgtaatcccagcacatggggaggttgaggcgggtggattaccttaggtcaggagttcgaaaccagcctggccaacatggcaaaacctcatctctactaatacagaaattagctgggcatggtggcgggtgcctgtaatcccagctacttgggaggctgaggcaggagaatcacttgaaccaggaaggcggagtttgcagtgagccgagatcacgccactgcactccagtctgagtgagagtgaggactgtctcaaaggaaaaaatatatatattttttgtagagacgaggtctccctattttcccaggctggtcttgaactccggggctcaaagagatcctcctacttcaccctcccaaagtgctgggattccaggcgagagccactgcacccgacctcaggacatgctgtgagcacggaaggaacccagaaggggctggctgtaggtgaccagtccatctcacaagcgggggcagcagcgggggcaggtgttagctgcatgggctgtggggtctggcctcttgatgcaccccggctcctgatgcaccccagcctcctgatgcaccccggctcctgattcaccccaggtcctgacacacccagctcctgacacacccagcctcctaatgcaccccagcctcctaatgcaccccggctcctgacgcaccccggcctcctgatgcaccccggcctcctgatataccccagcctcctgatgcatcccggctcctgatgcaccccagctcctgctgtcttgggggcgggcctggggttccacaagcccctcatcagactgaggttccaaactcgcctgtctcggccttggctgtgcccgccttggtcactcctgaaccctcacccccaggagggaccatggctggtatttgatgagctccagggactgagtccaatctccaggaatccaggtttcctcagaaggtcaagggaaaagcaagattcggggctcagacacattgaggtttgcaattttattaagaaaacaaaaattcaacctatacaaaaaggaaaatgcttccgttccaggaggcggtactgcggtgggagcagcagccaagtccgcgggaaaccgagctgctcgggcctgccctgcaccccccgcgcccccggccaggctaggcgtcctgctgctggatgaaggggttggggatggcctccatgccgtcctgcgggcagattagcaccacggacgtgccccggcacaccacgaggcccagctgccgggtgtcctccgtgagcttgtactggtcgtcagggtctggggaggagcagatagagaggactgagggacctccaggaagcctccgagaccccccacccacccaagaccctcgctccgacctccccacctgcaccctgcaggcgccacgagcacgcagggacctcagacgggatgcgctctgtggggcaggtccccggctcccacggctgagacccatggcccctagagaccagtggcagctccacagacagcagccacagccctccctcactccacaaaccatgggaacaagaaggcccaggtgatagccggctaccccgcgtctcagagctcactggggcccaggcaccagggccgggaaccaggttatcagatggccggccagaatacaggcaccctgggcctcctggtctctgcaaggtccctggagccctagggggccaatattcaccctataacaaagaggctgggggccgggcgcggtggctcacgcctgtaatcccagcactttgggaggccaaggcaggcggatcacgaggtcaggagatcgagaccatcctggctaacttggtgaaaccccgtctctactaaaaaatacaaaaaaattagccgggcgtggtggcaggcacttggagtcccagctactcgggaggctgaggcaggagaatggtgtgaacccaggaggcggagcttgcagtgagccgagatcgcgccactgcactccagcctgggtgacagagcgagattccatctcaaaaaataaaaaaataaagaggctgttcatgtggggtggggaccatgtgggctggcaccccagggaagtgccagcaagcccaagacaagctctcaagaggctgaaggcgattaaaactcctcactactgtggtcctgcagtggtgggggcatgggagaaccatggggcccaggtttttaaactttttttcagacaccaggtcttgctctgttgctcaggttggagtgcagcagtgcaatcacagctcacagcctcaacctcctgggctcaaacaatcctcctgccttagcctcctgagtagctggggccacaggcacatgtaccgccatgcctggctaattacattttttttttttttgtagagacagggtctcactatgttgcccaggctggtctcaaattcctgggctcgagtgatcctcctgtcttggcctcccaaagtgctgggattacaggcatgagccaccatggccagctacaagaataaatcttgtctcagtatcaatggatccaaggggcaagaccctctctctcctaagtcctgacattcccccagtgcccgggccgggatggggacttgccagctggggacttgccgcaggagcttctgggggagagtctgaggacttggcggcctcactggggaggggagcgagcgggggcagggaaatgagggagggtcctctggggaggagacagggaccctgcgttcatagcgggaattaacaagggcagaagaggaaaggcgcccgagaggagccccacggcacgctcactaccccacagcaaggctgctctccgctgggcgccacagctcacgcctggaaccccagcactgtgggaggctgaagcaggaggatggcttgagcccaggagttcgagaccagcccgggcaacacagtgagacctcagcttatctcttttttttgagacggagtctcactctgttactcaggctggagtgcagttgcaccatctcggctcactgcaacctccgcctcccaggttcaagcgattctcctgcgtcagcctcccgagcagctgggattacaggcatgcgccaccacacccagcaatttttttgcatttttagcggagacggggtttcaccatgttggtcaggctggtctcaaactcctgacctcaagagatcctcctgccttggcctcccaaagcgctgggattataggtgtgagccattgtgcctggcctctcacgtcaccaatttaacaaaaattaaaataataaaacatttaaaaaggttgtcctctaactgtgccgggcgccccgtcagtgtgtagagaccagtgggtgagctggcagctcccgtctctccaggccccacaacaatggggtttcctgctttgtgaggacgtctaggaccagtgagcgctcaagcccgtccatcggccgccacgaggcttcacgttggtaactcagaggttttgtgggtttgagagaagaagagccagcagggagccccacggctgcccccctcgtcccactgcccccctcgtcccgctgcccccctcaccccactatccccctcgtcccgctgcctgcctcggccgccaccccactcacctcgcatgtactcaatggtgccgtccagcacaaggttgaggagtgggtcgaagcccttcaggattccactggcttggagaaatcaccgggggagagaaaagagaaggcatgagatccgtcctgggcgcagggcccgccccagcatggcccaggtatggggctaactgctccagggatggaggactgagggtaggagagggctcccgggagtggccgatgacagccgcctccagagtgatctccaccacaggcagcagaccacgtctgcggggggccagatggcaaacacttctggccgtgtgggccacagggtgccggtcacagctgctggctcgggctgcctgggtggaggcagcttcggtaatgagtccatgtgtggctgaactgcggccggtcagctctactcacaggcactgaactgtgaatttcatgtaatttccacatcgtgagacagtcttgttttgatccctttctagctatttaaaagtcataaaaacaattctcagctcaaaagcagcagcaaaacaggcggcggcacgtgtacgcggtgggaccaccagccaggaagaggagcgaggctggcgcaggccacagcgcggatgcgcctgaggacgcacctgaggacgtcacgctcagtgagagacgccagacacagaaggctgcgcaccgtgagatcccatttctatgaaatgtccaggacaggccaatccacaaagacagggaagggatgcgtgggtgccagggccagggatgggacaggcagtgatggctgatggggacagggcttcctgtaggggagacagagtgctccgctctgacagcggtgatgactgcgctgcctgacctgtgctgagtccctcagtgagttcacggaatacaaaagaacaaatcccagccctgctgcttagggcttgcggggagcaggcaacagagatgctctgagacccaggtgcaaaggcttcgggggctgagacggtctctgtggcttctctctccacgctgcctgccccacccctcaagcttcgccgccttgggccacaacttgccaacttaggttagggctctctgacccggtggtgatctctgccatctgatcctgctccgcagtgtctggtgacactgagaagggtgaagggggagctgtgtgtccccagcagaggccagcccaccctctctgcctgggactcccctccactgccctgcaggctcctgcagccgaggcccagcagcagctccacctctgcgctcactgaggggcgtcccgcagccaccccctccctgctctccttcttacccctgtcatctttcaggtgcttcctccagacaccaacccacagcccttacggtgctgccctctgcacgcccacgccaatctcaggaagcaggcaccaccaatctcgggaagcaggcaccaccaatctcgggaagcaggcaccccgggcattattctgcctgcctgtctcctcccaaggcagggccgagagcccgtccacggctgctccacacacaccgagggccgccctgtgcggtggtgcgggggagggtctgcaaactacgacccccaggtgaacctgcccgccgctcctctctgtaagtcagagtctcgctggcccaccaccacactcgcccgctcaggcgctgaccagggtggctctcctgctctgctggcatagctcagtggttgtgacagagaccatctgggctgcaaagctaaagatatttgccgtctggccttctacagagaaggtctgcccgcctgcatacaagcttccgtccacctccacaggcttcagcttccacctccacggctccctctctctttgctcaagtccctcccctgcaaaatgaaactcacctataagatggggtcagatgcagatgttcaggtccttggcaccagcctgaccagtgagcccgccctcctcacggggagagatgtgagcactgaggtaggtaggtctctaacatggagccaaggtgcccctcctctggagtgtgggctagggcctgtgactctgacgggacaagatgtcactcctgcgcttaggttatgtggcaaagacaaggaactttgcagctgtaattagagcccctgaatcagctgactgagccaatcaagagagaaacaccctgggtgggcctgactgcatcaggtgagcccttcagggaccaaaccctttctgctttttgtgtgtgtgtgtgtgtgtgtgtgtgtgtgtgtgtgtgtgtgtgtttgagatggagtcttgctctgtcgcccaggctggaatgcagtggcgcgatctcagctcactgcaacctctgcctccagggcgattctcctgcctcagcctcccaagtagctgggactacaggcatgcgccaccatgcccaaataatttttgtatttttagtagagatggggccttgccatgtaggccaggctggtctcaaactcctgaactcaagtgatctgcccgcctcagcctcccaaagtgctgggattacaggcgtgagccacagcgcccagttaattgttgtacttttagtagagatggggtttcgccatgttggccaggctggtctcgaactcctgacctcaggtgatccacctgccttagcctcccagactgctgggattaaggcgtgagcccccgcacccggccccaaaccctttctgaaagatgattctcccactggcccgaataactgaatatggacaaatgtcagctcagcctgcagcactgtaggggcagaccaccacggtggaacagagtcccgagctggcagcgtccgggagctgcaagtgtccctagccaacactggccagaacggggaccctggccctgcaaaggtaaggcactgagctctgtcaataaccagtgggctcagaagaagaccccaagatgatggaccccaaaaaacaaccctcagttacaacctcctgagagcccttgaggctgtggtaccctggctcctgactcacagatcctgtgagataataaaatggtgctgtttcagctgctaaatgggtgatttgctatgaagggcagaaaacaaagggaagcagtgtgaccagcaagagcggccgctcactcatgtccttccatgtccggagtcagcatggtgtagactgagaaaacattttattcatattcctttttctttttgttttgagacggagtcttgccctatcgccaggctggagtgcggtggcacaatctcgcctctggggttcaagcaattctcctgcctcagccccccgagtagctgggactacaagcgtgcgccaccatgcccagctaactttttgtattttagtagagacagggtttcaccacgtaggccaggatggtcttgatctcctgacctcctgatctgcctgcctcggcctcccaaagtgtcaagattaaaggcatgagccactgtgcctggcctcctttttctcttttgagactgggccttgctctgtggcccaggctggagtgcagtggtgcggtcatagctcactgcagcctcaaaccctagggtgaagccaccctcctgcttcagactcccaaattgctgggattacacacgtgagccgccccgtccggctggggcactgtgatttttaataactctcatgccacccagttgtctacaatccagggacaaagaggtttgggtccccgtcttacaaaaaaaagaaaccaaagatccaagaggctattgaataagtgacgtgttgtctgactgcttacttcctgctgagagctgcctcaattacattacatgcctgtaaccattcattctcaccaccccctgtgaagtgggtggagttaccagccccatttgacaaatgaggaaacggaggctaggagaaggcagctcacttgcccagtcaaaaatgctaggctgggcatggtggctcatgcctgaaatcccagcaatttagggggctgaggcaggcagatcgcttgaggccaggagtttgagaccatcctggccaacatggcctctctactaaaaatacaaatattagccgggcgtggtggtacacattaattccagctactcgggaggctgaggcacaagaatcacttgaacctgggaggcggaggttgcagtgagctgagatcgcaccactgcactccagcccgggtgacagagcgagactgcgtctcaaaaaaaataatgaaaataaataaaagaggtgcttccgcatgcgtcctcatcatctctgttgctgggtttatttgaaatttttaaagagggggtaccgacagcgggagcctcctcaccttcgcggcctccctggaactttacccggatcgtcttgtcgatgtacttggacaagtccaagatgctctcctttttcttcttctccttatcctgcggggaaagcagagcgcatgagacctggagcgcggcccgagctccacgccccccggctccagattccgccgcgcgctcaccgccatcttgtcgcgccgtgtggctcttcgcaggcaccgccccgcgccctttgacctcccccacgcgcatgcgcggcgcatgcgtggcccggggtctcggggcgttgctgggaaacatctgccgttggttgcggcgggcaccggccgacatggcggcagcggtggcggctgcgctggcgcggcttttggcggcctttctgctcctcgcggcccaggtgagcgcggcaccggtcccgacggcaccgcgggctgcggcccttcggcctctctgtccccgggctacgcgcaggaacgaccccgctcggcccgtcttgggggtccagcctcggggatccgccgtccccgcgttgtcggccggcggtgccggggctcggccgtgaccttgcgggtctgtccccggctcctctcctttccccgcctcggaggccctccgccgctgcagcgccactcacttcccaccgggtctgaaatttgtgccccctccatcctccggttctgcttctccgtttcggggtctccagttgccgccggggacgcctctctccggctctgtggccttgagcaggcggctgcccacccctctccgagcctcagtttccccttaggcggaacgggcacggtgctaagctaacctcaccctagggggtgcggtgggggaacccagaggcgtcccgcgcgtcccccagtaactggcagcatcctggagcggccaggagtccagccctgcactggggtcggatccccgctccatcttttactccgtgaccttggacgatggaattcgtgtgcagaaggaggaccgactatggtgtggattctggaggttctgtccagggtgaccagcgcccagggccaacaggccttcattatgttcattgtgtgtcatttgatgtaaagagtgtcaggttctagtggggacagtctacgagatcgcactgtcataactgcatcttttattttcttaattccaaatcttccctctctcctgagttcggtggctcaggcaatggaacctggagcagccccacaaatgcagcccttaaccttcactaccccctcagagttctcactcttaaggcgtcgccgccacctggctcctcagtctccactcctccagccccaccgctatccctctgctgtggctgcctttgtccaccacatccccagtccatcctcgacacagcaggggtgaccctttcaaagtatgtcagaccgtgtcgcatccagatgagtgcgccgtccagttgtgacctggctgctggggaagcctgcagctcattgcagtcgcttcactctctagtcttttctcttaccctgagatgcccctggtctctgcaaggctgtcgggccccctcggaagctttctgagaaccccagtcctacccccagctgctctgtcagccccctttggactccccccattctgcagccaggcacctagagctccccagacatttggaaggagggggaaagccagaggtggaagaaagatcacagaactctgtggagagagggactcagtttgcctgggaaggcttttccgaagcagatctattttttttttttgagacggagtctcgctctgtcgcccaggctggagtgcagtggcatgatctaggctcactgcaacctctgcctcccggttcaagcaattctcccacctcagcctcccgaatagctgggattacaggtgcatgccaccactcctggctaaatttttttttttttttttttagtagagacgaggtttcaccatgttggtcaggctggtctcgaacttcagacctcaggtgatccacctgcttcggccacccaaagtgctgggatgacaggcgtgagccaccgtgcccggccccgaggcaggtgttctgaatgatgagtaggagtttgccgggtcggcaggaggggaagggtgttggaagcaccagaagcagcataagcgggggctgggaggtgtgagagctggcaggttatttggggttggcaaggggtgggctgtggctggagtgtagggtggaataatgctggaaggaagggtttacaccctgaaagatgtcaccaccaaggaggcccggggggtgggccgtggagggttgctggagcaggggcacagaggagggggcagtggtgcgagtggccccaggcagagagtgaaggcagagcattcagcctcctagtctggatgacaggttgtctggtggaagccaggccgtggaaggcgcttggtgctggggtgcgtggactttaacctgggcgggctgaggagtgtgagctttatccggagggtggggagtcaaaggatgtgtcagagggacgtgagagagcaggtgttcctgccccttccagaaccctggttgtaaatacaccctgagacgcctgtccctggaggggggcagtgcttcgcggcagtggaaatttgagtccgattgcccaagaatgagacttgctctcagggcaggagcctggttggtgacagtcctcaactcgcttgcttgctaccattctgtgaccctgagcaaggaagtcgacctccccagtgagacacctcccttcccccaccccacggagcccgctcctcagcagatctgagctggagctggtggccctggctggacccggcccggctcctggaactcctcagtcttcccagaagggaggctctccccgcctggactcactggcctgtttcaaaggcccttgatgtggatgctttcacagtcacttggaagcggggtttctaagcctagtagtttctgaacctgtgtgcggttgcaaagcgtttgtgctgcaattgtgaaggatttggaggtcgaggcttgggctttgagcctgtccttgtagcctgagctttttctgctcctccaaatttcggtgggcctgtctagaactcagggccctcttagagctgtggcctttggaagaattgttccccgttcctttaactcagcaggtgaggaaactcttcccggtgagatgccgcgttctctggcctttgatagaggcacaggcttgtttttttaatggaaaaccagttttgcgaattgtggagaggaaaatgcatgaatgtgcttttgtgcttttaaatgacccttttagagagaagcagagaagcagttctatcagttcccattttacacaaaagacacttttcaccagagtccctgatcccatagaacagagcttggcaagtgttttctgggaagggctagacagtagttttgctgggctctgtggcccacgtggcctctggtttggttgcttggtttctcctgttgttcttccagagccggagacccttccttaggaatgggcttggctgtgttccaataaaactttatttacaaacacagaaggtgggccggactgtggattcttggcctctgccgtgacccataacatccctcctggaggaggggttctggggggctgtgttggaaggggcaccctccgggctcggcaccggggccagactaaggggtgctctcacgggcaggcagtctggtgggcagaactggaaagaaagggctcctgactctgcctgggctctgggggaggtcacatgggaggtgcttggagtggggctggggcagctgtgggaaggaagcagcattagccaagagctatgagacccccagtcgattgtggggaccggggctccgtgggctttcaccatgctgccaccccgaggtcaccagggccttgacccagatgctcccagaccaggccggagactttgcatgatttcagtgatgagggcccggctgttggagagcccgtctgtgcctgtgtgctggggttggtgtctggcaccagggacctttgggacctttagccaagccagagctgtccttccccagtcctagcttggcagagctgcgtctgcactgttttcccttgtggcgttgtggtgtcggcccgtttggtgcgcagctcagcatccgttcagacatgtggctgccatcctgttcctgatgaggcaaatggctgtggcctgtttgtttccgtgacaggtcccctggggaccagggggtgcggctgtctctctgtctgggaggtttacagcctggcaggagccctgcagccccagaaggctgagggctgggtgctcctgagaacgggcaggcctagggcatggggtgggtctccttggtccctggcacgtggtttttcttctgggacccctcctccctgtgcaggccgggctcccctgggggcccacactgagggtctgcagtgtggcacagcagctgggacctgggccccatcgctgtgagaccctctggtgactggcatcctggcgagatggagatgtctttgtcagctgctgggtgggggccctgggcaggggagcagaaggaaggtggggatggcaggtgcgggcggctggactgggctctgctgggagggggagcaggaggagggtggggatggcaggtgcgggcggctggactgggctctgctgggagggggagcaggaggagggtggggatggcaggtgtgggcggctggactagactctgctgggaggggagcaggaggagggtggggatggcaggtgcaggcggctggactgggctctgctgggagggggagcaggaggagggtggggatggcaggtgcgggcggctggactagactctgctgggaggggagcaggaggagggtggggatggcaggtgcgggcagctggactgggctctgctgggaggggagcaggaggaggtggggacggcaggtgcgggaggctggactgggctttgcgggagcaggaggaaggtggggatggcaggtgcgggcggctggactgggctctgctgggaggaccgtggttctgcctaggccagagccctgcagtgtccgccgtggtccctgcggtgggaggcgtggtgagcagtgccagcttcctgcttgtggaatccgtctttcctcatagctccatcctgctctgttaagcattaaattgaagaggtgggggtcgtcccttctggtccaggcccgtctactccgcagccctcctgggaggcgtccagggctttggggcctggtcctgccccctacttcattttgagagcgtggcaagggccccagcccgttctgtcctgggcgcggtggccaccacccctgcttctcttggctggctttggcctgttgtccccgttgtgtgtcaggggctcctgcccgtggatccgggccttctccctgtggccttctctgagctgctgctgctgcaggctggagagcaggaacttgaagccctggctggctgttccttctccctcctgcgaagtgggagctgctgtgctggactctgctgctttggggcttcatggggaacatgacgctgtctgtcctgctggtggcagcgtgacctgttgcaaacctcagcctgtcccactcaggacccggtgcccgtaggccccttggcccacctgcttcctgctgttctaccagtgggagctgaggggtgctgatctggggatccccctcgtctgggccccaccgtgtgcctgggcccccgtgtgccttggagcaccagccaacaagcagtgcccacggggctgtgggtcaaaggccacccagacctgaggggtgcagaggcttgcttgtccaggcctcccgcccaggctgggggccaggtccgctggggccctgccctgcttccctgctcagggctctgcccgtggctctgcccgtggctgtcattctcccaccgtgcccactgatcctgggaggcccaggaggtggtgcgatccctgttttttggtgcagaaactcgggagccacaaaggggtgacctgacacactcatggtcaccagcctggggctccctgaggaaggtgagccagtctgggtctttgctgtaaaccacgtatggtcacgtccctgtctgtcctgtcgagagggggaagcatcccagaccacctggtgaacatgggcgcccttcctggaggcgtcctcccctcctcgggcctgtttctcgtggggcggtgcagccccgcacgtcccgtgctgtggctctgactgctggccttgtcctgcaggtggcctgtgagtacggcatggtgcacgtggtctcccaggccgggggccccgaaggcaaagactactgcatcctctacaacccgcagtgggcccatcttccgcacgacctcagcaaggcagtgagtacccgctggccgggcgccgctgcggaggagaatgcgggggccccggggctctagagacacatccggctggggttgcaggaaagatccagaggcgagaggcaggccctgaccaggtctgggggactcttagctggcccccagttcccctgggcctccccaaccctggtcatcaatgcaagctgtccatgcggccttggggtgcagatccagaggcaccggccgagctccatgtggtagataagggtctctactgctccatgccggggaccctatccagtgggcccagacagaggggtcctcagaggagtaacagcagagggcacagtggggccccagggacgagacctgttcctttcaccgtcttcctgactggggcactaacacctgctgctggatgagtccctccctcagaggccccacctcctttcccacttagtcctcatgccccgcctcctttcccaccgcatccctcaggccccgcctcctttccactgcatccttcaggccccgcctcctttcccactgcatccttcaggccccgcctcctttcccactgcatccttcaggccccgcctcctttcccactgcatccttcaggccccgcctcatttcccactgcatccttcaggccccgcctcctttctcactgcatccttcaggccccgccttctttcccactgcatgcttcaggccccgcctcctttcccactgcatgcttcaggccccgcctcctttctcattgcatccttcaggccccgcctcctttcccactgcatccctcaggccccgcctcctttctcacttcatccctcaggccctgcctccttttccactgcatccctctggccccgcctcctttcccaccacacccctctgtccctgcctcctttcccactgcatccttcaggccccgcctcctttcccaccccatccctcaggccctgcctcctttcccaccgtatccctcaggccctctctcctttcccaccgcatccctcaggccccgcctcctttcccactgagtccctcaggccccgcctcctttcccactgtgtcccgccccctcctggagccctcgaggtgtgccggcgaagaggcactagcatcttcctgtcagctttatgcatagtgtgtgcgtgtgagcacgtgtgtaatcagtatgtgcctggacatgctcatgtgtctgcatgtttatgtgagtttgcatcagtgtatgtgtgcatgtgcctgagtgtttttttgtgtgtgaacacataggtgtgtgtcaacacatgtaataggtatgtgaacacatgtaataggtatgtgtgaagacatgtgcctgagtgcatatttctgagtttgtgtgtgtgagcacatgtgtactagatatgtgcatggacatgtgtgccttagtgcgtgtttgtgtgtcagcacacctgtgtgtgtgagcatgtgtgtaataggtgtgtgggggcatgtgcatgggtctgaatgtgtatgtctgtttttatgtgcacatgtgcctgtgagtgtgcatgcaatagttttgtgtatggatgtgtgagtgcatgtgtgtctgtatgtgtgcaggtgtgtgtaagcatgtagctacataatagttatgtttgtggatgtgtgcatgtgtctgcacatgtgtgcgtgtgtacatgtgtaataggtctgtgtgtatgtgtgtgtacatgtggataataggtttgtgtgtggatgtgtatgtgcctgtgtgtttgggttcgtgtgtgtgcatgagtgtgtgtgagtgcatgtgtaataggtatgtgcgtgtgagtgtgtgagttcatgtggcgtgtgtgtatgcatgtgtgtgtaataggtgtgtgtgcgtgagcttgagtgcacaggtatgtgcttgtatatgcacacgtgtgctgtgtgctctggcctggctgtgtgtgcgtgtgtgtgtgcatgtgtgtaataggcatgtgtctgcttgagtgtgagtgtgcatgtgtgtgcttgcgtgtgcatatgtgtgccatgtggtccggcctggctgtgtatgtgtgcacgtgtgtgtgcatgcactccagcctggctgtgggtgtgtgtgtgtgtgcgcgctggcctggctgcggctatgtgcgtgtgtgtgtgtgtgcactccagcctggctgtgggtgtgtgcgtgtgcactggtctggctgtgggtgtgtgtgtgtgtgtgcatgtatgcatgtgtgtgccgtgtgctccagcctggctgtggacgtgtgcttgtgtgtgcgcgtgttccggcctggctgtgggtgtgtgtgtgcgtgtgcgtgtgtgtgtgcgtgtgtgtcttggcttcaggggctgtgaggcccctgagagttggggctttgttctctgcacactggaaaccctcccccttctcacagatgcctggccgtggtggggctgcggtggggacccacttggtcttgctgagtgatctgtgacggctcgcggggtggctcaggtatcaggggacagccatgtctgtgaggactccggccccgctcagatgaggcagcccagcccgtcgcccagggtccggctgtgggagctgcagtagggatggctctgcctaggtgggccgaggccgtgcggggctttaggtgagggctgggatctaactcagcgcaggcttcaggtgggagaacgggcagctgggccctcctggtgactcacatcacgtgagacaacactgtgccctggcctttccagtctttcctgcagctgcgcaactggacggcctccctgctctgctccgcagccgacctccccgcccgtggcttcagcaaccagatcccgctggtggcgcgggggaactgcaccttctatgagaaagtgaggctggcccagggcagcggagcacgcgggctgctcatcgtcagcagggagaggctggtacggccctgtgcgtcccccgctgggccagctctcaggggcaggaggggggtgcaggaggcagagatggcagcagctggggctggtcttccgacttctcgctaaaggcagatccatctgtggggaggatctgggccgagtgtgaacatggggaggatccgggccgagtgtggccgtggggagggcggagatgagtctgttcttcctgagctgctggctggggctgtggaactttggccgtggtcttgttgggtgcctgtcctagagcagcccccaggggtgacggagaccacactctctgtggggatgggattggggtggcttctgaggagcaggtggcctggccctgagctggtcctttctgggtaccctggtgcccttgccctctagccggtggggccgtgctcgcctgtggtcctagccaggtggcctgaagcctggccccttttccatcttctgtgaaatggggctgtggttgagagctgggggcctggcagggctggtcacagcacagggacatgccgactgctgggctgggcagggtgcgtggccgcccctgaagtgtagttttggagtaagaaggaatggagttcaggaattccctcacagctctgcctgtggctctgggctgcccccgccagtgttgcaccctgagcctggcaatccacggaggcctggtgcaggggctcagggccgagggcagagcaggccgggcagagccgagagtgccatccctgtccgcacacgctgccgtcgtagttgagagaggccctcagtgggtgcggggctcaaggcggcttagtgggcaggcatgggctgtgacaagtatcactcaggacttgtatgtgcggttcgggagtcccacggccgagggagggattagtggcgcttttaggcctggggccctgttgtcaggtgaagaaggcttgatgcccttcggcctccctgttcttgggtcctcctggggggccggaggctgtcagctgcagagggggagccagcaggcgcccccagcctgacccgagcctcgagtgagggtcccaggagaggaggcgaatgggcacagagctgggggcccacccactgctgcgggtgatgcctgccgctccctcctctgggcccccaggtccccccggggggtaataagacgcagtatgatgagattggcattcccgtggccctgctcagctacaaagacatgctggacatcttcacggtaggtctgcgccggctcagacccacgctcccgaggagatggggcagggggcttcgggctggctgccgggggggtttgtgcctcagttggtgggatcagggtggtgggtgaggcgtggcccctgcaggccagggtctccagccccagccccacagcccacagctgcacgtcgacccatggctggcgggtggctctgacgcctgcctccggtgtgttccttgaggcagcgtttcggccgcacggtgagggcggcgctgtatgcgcctaaggagccggtgctggactacaacatggtcatcatcttcatcatggctgtgggcaccgtcgccatcggcggctactgggccgggagtcgggacgtgaagaagtgagtttcgcatcgtgcgtgtgctgtgacggggtcgggcggctctgacacgggccgggacggccagtcttccagaacagcagtgagtgctttggcctcggcaggcacggctcgccccgtggagcccttcgtttcttcctcaggaggtcctgggacagaatcagtctcttttcctgccagggtgggctccgggcacctggtgggtgtgtagggctgggcaggtgtggatgtggcaggtacgggcgtggcaggtgcagggctgggcaggtggctggggccagctaccctcttcctgctgagccgcctgggtctggggaggccccatgtccagggctctttatgcagatccaagctgcggttgctgcccacacgccagcctctggcccggcctagtggccaccccagctcaacccagggacgcgggccctgccaccctctgctgtgtggtctcctctgccctggggacgttcggggcggttccttgcacttcagtcccccccgggtcccctcctgctcccgggttttctgccccgttcccccgggtggctgtgggctcccgagccccgtgtcggccagccggccccagggccccacgaccccatggtgtctcccaagaaggtacatgaagcacaagcgcgacgatgggcccgagaagcaggaggacgaggcggtggacgtgacgccggtgatgacctgcgtgtttgtggtgatgtgctgctccatgctggtgctgctctactatttctacgatctcctcggtgcgcggccccgggcgggtgggccgcggcgtggagatgcagcccgccccgtgcggagggagggtggcgtgcgggcctggcccccggcctcacggccctgcccctgcagtgtacgtggtcatcgggatcttctgcctggcctccgccaccggcctctacagctgcctggcgccctgtgtgcggcggctgccttcggcaagtgcaggtgagtctgccctgctggccccgacgtgcctgactctgtgcggtgatggccacggcccctttgccgccccatagccccccatggtgcaatattgctcagagtctacagcaggcgctccctcagtgctggcctggggctcctaggcccaggagcagggcggagtctgggcgagctatcaatggagcccaccagcagccaggcgccaggggtggcggggggagggtgcccttgtccccaggaaccctgccccaggtcgcaggccgaaccctgggttccccagggttctccggggaacccagaaggttccccacagcccagagcttggcctggctcttaggggtaaagggagctgctggggggtctccaacaaagtcagacctgggtctaggaagcggggctagcccagggggagacctttttgtgttgccgtccctgggtgaggaggtgggaggtctggagcaggcagggcctcgggcgaaggggcgcagcgcaggcgaggggctctgtgggtacagcccgtggcccccagcgcctgcccgggtcgggctctgccctgcccttggggtgcctactgttgtcatcgtgtgggatgtggagtttaatgaggacaacagagtgggggctgccactctgcagggggtgcctgggccggtcccaagggtggtgggcagtgggatgaggccgggagctggtgggcttggctctgactgccccgtgccccccaggatccccaacaacagcctgccctacttccacaagcgcccgcaggcccgtatgctgctcctggcgctcttctgcgtggccgtcagcgtggtgtggggcgtcttccgcaacgaggaccagtaagtgctgcttcccccgggccccggcgggcagcggagtcctcgggtgcaccagggctcctggggccctgactccctgccctccctggaggccgccccagcctggagctgcttcagcaccgcgtgatgaagagccctggccccgggctgctctgacagggctgcgagggcgtttcacctggggtttgtccgggtgtcatgggaaccctgactggaatccgggaggagaggccggagcccctgtggccaggagccacgtcctccagcctggatgggactcctttgtggggcatcgctgcccagggccacagtctgtcccccgctgtccctttcctggcacccacgtgcacgccgcaggttcgaggcccagggtgtgggcaccagggcacccggtcctcttggtcatgactgctgcggcttctgagcagtggtggaggtggggcaggcactgctccccccacgctcacctcccacgtggcctggacttgtggctgcctcccgctggccgggcctcccccatgaggccgagtgcctggtgccgtgttgggaggacagagctggcccgtccccgcccggtccccaccgctgtcgctgataccatctggcacttcctcccagccttcctgaggcagccaagtacgcttggctttggtgtgtattggagccacggcacgtttaactggcagaaggaagatgtgaaaatattttgaatcctttgtacacaaagagaaaatgaatcttttcagttatttccaagccaggaaactcgctccgtcacatgaagttagagcaggcctcagtcagctgggcgcaggggctcacgcctgggatcccagcatttggtaggccaaggcaggacgatcactttgcccaggagttcaagaccagcctgggcaacaagcgagacgccctatttaagaaataatataaaatcagaaaaaataactggccgcagttctctgggtgcttgaagtacgtggcgcctggaattggctgtaccagcgtctcccatggaggcctctgctgttagcagccgccccgccctggagatgtttttatcccattttcaaatgaagcctttgatgtttgagacgctgaggaacgctggggaactcgtccagcaagtgacaggcagagcctgcattgggggcaggggccagcggggaggggactctggggcttcgtggggccaggagagagccgaagttgcggctggctgcaggggccgtggccttgtgcaggaggcagttctgtgctttgccccagggcaccaaccgcatggcagccccacccactgtggacccagaggttctttgaggaaacctggtgtggcacaagttttaatttaataaacagtttgggcacgggggctcatgcctgtaatcccagcactttgggaggtgaggcgggcagatcacttgaggtcaggagtttgagaccagcctggccaacatgacaaaaccccatctctactaaaaatacaaaaaaatttgcctggcattgtggtgtgtgcctgtaatcccagctacttgggaggctgaggcaggagaattgcttgaacctgggaggtggaggttgcagcgagtcaagatcgtgccaccaaactccagcctgggtgacagagtgagactccatctcaaaaacaaaataaaaacagtttggaggggtcagtgcccaagccctcctgcgcacgcaccctctgcctggcccctgcctacagcctgtgacccctgcctacagcgtgacgcccaccatccggggacagtgactgaggggacgcagccggccaggcccgtgtccaccatcctggccccaccatccggggacagcgactgaggggacgcagccggccaggcccgtgtccaccgtcctggccccaccatctggggacagcgaccgaggagacgcagccggccaggcctgtgtccactgtcctggctgccgagtggtgggctcctctacctgcttccgcagggtgggccctggggtggggcctgtgccgccagccctgctggagttgtaacagcaggggtcctcccacaggtctggggtcctcagagtcatcccctgggcaggtggaagggcagtggggctgcgtgctggctgagagcaagggccctgtgtggctcgtgggaggcggcgtcctgggtggtcagccagcctctgccccggcgaggatgctgctttgtcttgcaggtgggcctgggtcctccaggatgccctgggcatcgccttctgcctctacatgctgaagaccatccgtctgcccaccttcaaggtgagtgcagggagggcacggctgcggggcagcatgggtagtgggggcccttcatcctagcctggcccgtgtggggctgtggtccttgcaggtctgtgctcctgctcactgccctggggatggccgcctaggcctgttgtgaagggtggggcttgaagattgggtcccaaagcccccgctgaggcggcctgggtgggtggctgcggggcggttcccggcaggggcaactcatgtctagatgaggtggtggtgagagtggttgaatagggctggaggaactggcctcaggtggtaccgggagtgcggggatgttgtcaagccccaggcggctgcactcccgtgagggccccacagcaccccaagcaagcggcatttgaatgcccaggatggccctctgtatccccagagccggccctgcgtggcacaggcctccgccctcccgtccccgccttcctgttacgtggagactctaaaagcctgacttttgcccgtaaatccctacctgatgttgcttccaaagctcctcctgcgtggtgcgtccctggcactgggcacgctctgctcaggttcctttaaaggctgcctcccaggaggaggcgctgggcctcatgagatgggagtgggggaggcacgggccggggtgggggccgccctcagccgtgggcttcgcaggcctgcacgctgctgctgctggtgctgttcctctacgacatcttcttcgtgttcatcacgcccttcctgaccaaggtaggcgactgcctgtccctgctccaccccatcaccccgctcccccgccccctcgcaacccccgccccatcaccccccccatcaccccgccccctcgtcccgccccctcgtccccctccaccccacaccgtgctcccctgccccccaccccatcaccccgctcacctccaccccatcaccctgctcccctgccccatcaccccccatcaccctgccccttgcacccccccatcgcatcaccctgccccctcgccccatcaccccactcccctgcccccccaccccatcaccacgctccctcactcaaccccattctgtgcagagtgggagcagcatcatggtggaggtggccactgggccctcggactcagccacccgtgagaaggtgtgtcttctgactgcagggtctcaggttgccatgggtcaaggtgttgcgcggagcggatagggctcgaggcatcccgcggccgggtgagggtcctggaggacattgtcctcttcccgtctttgcagctgcccatggtcctgaaggtgcccaggctgaactcctcacctctggccctgtgtgaccggcccttctccctcctgggtttcggagacattttggtgccaggtactgaggcgggtggagcacacgggtccacgctgtggggcagggccccgggcggctgaggtttgcctttgggagtgagtggcccgcacaccgtcggctggagataaagccctgagggtcagagtcgggcaggttggggccgttgaggcctgggtgcctgggcagcgagggcattgcctgggtggggtagggaccccctttgttcctagggagcggggaaggccccccgattgcagacagcctcaccccatcctgctcggggttgtgcaggggtccttgctggggcctggatcccgggtcccagtgagctcatgttgctgcagaaggcagagactgtaccctcgcagcctcagtgtccccagggtcctgccaggtgtgtctgcctggactttgttctcactgtggtctcagtttacccactgagagtcatggcagccctgtcccgagcgagcgtgtggcctgtctgtgaaatgacagcagccaccaggcagcgagaggcccacggcgcccacaggtgctcaggtgcccgcccgctcccaggaagcccctgctctgaggctctgcgggcccgagtaagcctccgccctgtgcctcccccagggctgctggtggcctactgccacaggtttgacatccaggtacagtcctccagggtatacttcgtggcctgcaccatcggtaagtgcctcggttgggcccgtgctggcctctctggctccagccccaccccgacttagcctctgtcctgaccctgacccctaaccccaaccccaaccctaaccctaattccaactctaacaccgtaaccataacaccctaaccctaaccccctggccactccgggagctgggctcgggtggctgggcctgtgcctgcatccccctctttctcattctccccgggcctgtgcctgcaaccccctctttctcattcttcctgggcctgtgcctctgtccccatcttcctcattcttcctgggcccgtgcctgcatccccctctttctcattctccccgggcctgtgcctgcaaccccctctttctcattcttcctgggcctgtgcctccgtccccgtctttctcattctccctgggcctgtgcctccgtccccctctttctcattctccctgggcccgtgcctccatccccgtctttctcattctccctgggtccgtgcctccgtccctgtctttctcattctccctgggcctgtgcctccgtccccgtctttctcattctcctttggcctgtgtccacatcctggtctttctcattctccctgggcctgtgcctccgtccccgtctttctcattttccctggcttccattgttctgttcttttcttttccttttctttcctgttttcctctttttgtctttttcttctttgccttgtcttctactgtttcttttgttatgaacgtatttacgcaaagtgctgttatctgttgacccacattgttttgaaaaatgtcccccaccgcagctggccctaaggaaagaagctgtggtgctttctggttcctgggcacagggccaggccaggcctcctctgccgagccacgcccccgaccctgccctccacgtggctccctaaacggccactcccagggccaggagagttcaggccggcctgtcccctcacacctgcctcctgcagctgcaggtgcccctggctttcccctcgcccgattttactgtcttcatgattatcctttaaaatcacggctgaggccgggtacgggggctcatgtctgtgatcccagctttctgggaggctgaagtgggaggattgcttgagtccaggagttcaagaccagcctgggcaacatagtaagaccctgtctctgcagaagaatgcaaaaattagccgggcatggtgacatgtgcctgtagccccagctactctgcaggctgaggtgggaggatcgcttgagcctgggagttcaaggctgcagtgagccatgatcgtgccaccgcactccagcctaggcaacagagtgagaccctgtctcgaaaaaataataataaaatgaaagaaaaaataaaaacacagctgcagagatttgtctctcctgaaacataacttgtcaagttgtccctgtaattcctgagactgaagccgctgaggctttataggtgccagccctccctgtttgtgtctgtctgcgtctgttgatgatggctgatggacacgtggatggcctaaaatggaccaatagggacgctccccgtggcatggcgtcagaaatacagagatgggtgttagaaaaagtgccgggagcagtgtgcttgctggacacagcggctctttttttaagagtgttctagcaaataattaattttctcagagctttattttgaaataatttcaaatgacagttgcaggatcgctacagagaactcccgtgtgccccgttctcagagggactggtcatttcttcacattcgcttgattccgttctctctccctccacacacacttacgcgctctcattcacctgattccgttctctctccacacacacgcgctctcattcgcctgattccgttctctccctccacacacacactcacgcgctctcattcgcttgatgccgttctctctccacacacactcacgcactctcattcgcctgattccgttctccttctctccacacacactcacgcgctctcattcgcctgattccgttctctctccacacacacacactctcattcgcctgattccgttctctctctccacacacgcgctctcattcgcctgattccgttctctctctccacacacacacactctcattcgcctgattccgttctctctccacacacactcacgcactcttattcgcctgattccgttctctccctccacacacacactcacgcgctctcattcgcttgatgccgttctctctccacacacactcacgcactctcattcgcctgattccgttctctccctccacacacacactcacgcgctctcattcgcttgatgccgttctctctccacacacactcacgcactctcattcgcctgattccgttctccttctctccacacacactcacgcgctctcattcgcctgattccgttctctctccacacacacacactctcattcgcctgattccgttctctctctccacacacacgcgctctcattcgcctgattccgttctctctccacacacacacactctcattcgcctgattccgttctctctccacacacactcacgcactcttattcgcctgattccgttctctccctccacacacacactcgcgctctcattcgcttgatgcggttctctctccacacacacactcacgcgctctcatttgcctgattccgttctctccctccacacacagactcacgcgctctcattcgcttgattccattctctccctccacacacactcatgcgctgtcattcgcttgattccgttctctctccacacacactcacgctctcattcgcttgattccgttctctctccacacacactcgcgctctcattcgcttgattccgttctctctccacacacacacactctcattcgcctgattccgttctctctccacacacactcacgcactcttattcgcctgattccgttctctccctccacacacacactcgcgctctcattcgcttgatgcggttctctctccacacacacactcacgcgctctcatttgcctgattccgttctctccctccacacacagactcacgcgctctcattcgcttgattccattctctccctccacacacactcatgcgctgtcattcgcttgattccgttctctctccacacacactcacgctctcattcgcttgattccgttctctctccctccacacacactcacgttctcattcgcgtgattccgttctctctccacacagactcatgcactctcattcgcctgattccattctctctctccacacacactcacacgctgtcattcgcttgattccgttctctctccacacacactcacgctctcattcgcttgattccgttctctctccacacacactcacgctctcattcgcttgattccgttctctctctccacacacactcacgcgctctcattcgcttgattccgttctctccctccacacacactcgtgttctcattcgcttgattccattctctccctccacacacactcacgcgctgtcattcgcttgattccattctctctctccacacacactcacgcgctctcattcgcttgattctgttctctctctccacacacactcacgcgctgtcattcgcttgattccgttctctctccacacacactcacgctctcattcgcttgattccgttctctctctctccacacacactcacgcgctctcattcgcttgattccgttctctccctccacacacactcgcgttctcattcgcttgattccattctctccctccacacacactcgcgttctcattcgcttgattccattctctccctccacacacactcacgcgctgtcattcgcttgattccgttctctctctccacacacactcgtgttctcattcgcctgattccgttctctctctccacacacactcgtgttctcattcgcttgattccgttctctctccacacacacgcgctctcattcgcttgattccgttctctctctccacacacactcgtgttctcattcgcctgattccgttctctctctccacacacactcgtgttctcattcgcttgattccgttctctctctccacacacacgcgctctcattcgcttgattccgttctctctctccacacacactcgtgttctcattcgcctgattccgttctctctctccacacacactcgtgttctcattcgcctgattccgttctctctctccacacacactcgtgttctcattcgcttgattccgttctctctctccacacacacgcgctctcattcgcttgattccgttctctctctccacacacactcgtgttctcattcgcctgattccgttctctctccacacacactcgtgttctcattcgcttgattccgttctctctctccacacacatgcgctctcatttgcttgattccgttctctctccacacacactcacgcgctctcattcgcttgactctgttctctctctccacacacactcacgctctcattcgcttgattccgttctctctctccacacacactcgcgccctcattcgcttgattccattctctctctccacacacactcacatgctctcatttgcttgattctgttctctctctacacacactcacgcgctctcatttgcttgattccgttctctccctcgacacacactcgctctcattcgcttgattccgttctctctctccacacactcacgcgctctcattcgcttgactctgttctctctctccacacacactcgcgctctcatttgcttgattccgttctctctctccacacacactcacgcgctctcattcgcttgattccgttctctctccacacacactcgtgctctcattggcttgattccgttctctctccacacacacacttgcgctcttattcgcttgattccgttctctctctccacacactcacgcgctgtcattcgcttgactccgttctctctccacacacacactcacgtgctctcattcgcttgattccgttctctctctccacacacactcgcgttctcattcgcttgattccgttctctctccacacacacactcgcgctctcattcgcttgattccgttctctctctccacacacactcacgctttcattcgcttgattccattctctctctctccacacacacactcacgctcccccgtgtactgcagttggccctcactagccatgggttcctgcagctgtggatttcactagctgtaggttgaaaatatttggggaaaagatttgtgttcttatctgtactgaacacatgcagattttttgggccagttttcccgaagcaatgccatgcgacagccattgcctgcggcgacatcacgtttgcgtttgtaggaacctatggtgatttatggtttggcaggacgcgggtgggttctaggcagacactgcaccagtttacgtcagggacatgagcaagggggtcctggcagccctcccctgcgggtgccaagggtggccatgtgtgcgtttgtgtatttacatgcacacgtatgtaaatcacaggctgcgttctcaggggactgggggcacggccccggtgggtggacaccgtgccctttgaccccaaacatttcactgggtgtctcctgagaacatagtttatatgcccacagctcagtgttcaagggttttctggtcaggcacatgtgtcaccttcggctgattttctcagaggttcatagaaactgcatcccagacacgtctcgcagccccctccgctatcacgtctgcctcccgctgtcctgcagctgcccggaccctgcccctccctgtccctctccttgccctggcccttccatgtcctcggtgaccctggctccggtagggtcagggtgggattgtggcccaggaggtgccggaaggatccatgtactttggggagcctgtggccctgccggctgaacccccactgtacctctcccgtcctcgcacacccctgccctccaccaaccccagcccgctcacgttcttcccagggaaatgggtggtggccctggcctgcctggctgaggtgatgcctcctctgtccccacagcctatggcgttggcctccttgtgacattcgtggcactggccctgatgcagcgtggccagcccgctctcctctacctggtgccctgcacgctggtgacgagctgcgctgtggcgctctggcgccgggagctgggcgtgttctggacgggcagcggctttgcggtgaataccagtttgctctgactgtgagaaatactcgcctagtgagccctaactagagttaaagttgagtgagacctccagccacagccagccctgcggccgcgacggggctcagggtcctggtaccttctgctttgggtgtcatgcgcgtgaggccccggtggaaggacgtgcgtgcagctcctgtgccgggtgggatgcgggggtgccaggtggggcccgggggtgccgggtgggacgcgggggtgccgggtggggcccaggggtgccgggtgggacgcgggggtgccggctgggactcgggggtgccatgtcctttctaaagttgcttctcccaaatagtagtgccccacctgcgtgggcatcgggcatccatcgcctctcctgccgagagcgaggcgcctgactgggggtggggccgcagggccctggacgaggggagcaggcctgccctggctgtggaagccctgtcccctgtcccccttggcaaggcagggggtggttggcaagggttaaacgtgagatgcagggagggcttacgccacgtcggttctgctcttgtgattttttgtgaacaggagtgggtgggacccccccttccagtgtgccgctcaggtgacttcctgggttcccgggactcaggcgcattgcgcccgagagctgcccccgcccctccgggcagcgcctcttggagtccatgaccgcccagggagcagccctgcgccatagggcgatcctcaggctgttgggcatgggtgcagctcctcccatagctgatctccctctgggggagatgccgcgcttctcagcggtgctggccgcgcatggggtcctacgtcatgtttttgtggaggttaaaccacacccgtccctgccgcactggtgtgatgcattgggtcgagctgtggttccagtgccgagctgggctcatgggtcccacagatgggaccatggcctgagaccaggccccagggagaagtctcctggggccagcacccccaccccaaaggtctccccattctgatgggcatttcagaaggttcaggagaagccggggaccaggcccaggggcgagagacggtagtccaggcttttctttggagaggctttgcacagctcccagcctctgctggcctcggatggccctcccgcggcacctgtgccgatggacagggtcctgggtgcccgtaggttatggagccggccccctccttgggtccagagcccctggggatggcgcctcattttgaccctgcccccgtggcctgcgggtgctgggtgtcctggcccctgccagggtcctcctctgggtccctgtctccgcctcacctctgcctcccttctcctgtagaaagtcctacctccatctccgtgggccccagcaccagccgacggcccgcagcctcccaaagactctgccacgccactctccccgcagccgcccagcgaagaaccagccacatccccctggcctgctgagcagtccccaaaatcacgcacgtccgaggagatgggggctggagcccccatgcgggagcctgggagcccagctgaatccgagggccgggaccaggcccagccgtccccggtaacccagcctggcgcctcggcctaggggaggggtgagacgctcgctgccgtgcccgccacaccaagatgttggggctgcctggcgcccactggagacagacagacagacgcctgtcccccgggaccgaggcctgtgccgtccccacccgccccaacatggtgctcatccttgccgagacccctgcggtctgtgcccgcgcccagcccagctgccccggctgcacgcctgctgctcccagctcgcccggctgccacaagctctctgcgggtccatcctccccaccggggtccgtcctcgcaggccctgcccggcctctctgcagaccctcaagcgtcgtctgcatgagtgagcaggcgtgggtggactctggccgcggccacacttggtgctcaccagctgcttcggccttcaggtgacctccctccccacggcatcctgctctccgggtggaagagcagctttctgtctcccagaaggcatcgcttttccctcttgagcagatcggagcccctgggaggtttggaagctgcctccaagcctaggacacggaccagtggccggggcggcctctggcccctgacgctggctgagacaggcccgtggggcggggttttggggcgtgaacaaggctggcagtaagtggacaagctgctcccctggctaaggccctgccctgccctcagccagaggtgcctggccatgcctgcacactcctccccattttaataaatggtcgcaacttctagaagtcctgctggtgccacctggtggggtggacgtctctcagactgcccttctgacaagcaggggtgggcgccaggcaggctgggtcaggccctcaggggtccctggagccctgggagggagggactgggtcgtgggaggtcctggtagctcccggcacccaacctcgcttcccgtgtgggccccgtgttgcttttctgctgagaggggcttgggcctcggttctccctgtggcagcggcattggtgcctgggttcttaaccctctggacccagcagctaggagcttctggaacccacgaggacatctgccactggcatggtctactcactgatggggtcctcctgactccagggcagagacgtccgtgcgggaactgaccgaggcgtggccccaggccccggcatcctcccctcgctgcacgtggtcacttccgaagcagcgctccctgtggccgcagagacagagcccgcaccctggctgtctgtggtgcctgggccccagctcccgcccgccacccgccctgttgagtgcggcctccagactcgagtccagaatctgtttctgtcaagtcagtcgtccccagctgcacacggggactgctgagcgctgcgctctcacgggtctgttccggacagagggtggcaggggtgagccctgatcccttacaaaaaataccagcttcccagggagtaatggcgccttcactgaagccattttgtacatggggacggggtggggacgtctcttttttggtgttggacgtttgaccagtggggaggggttcagaggcggcggtcctgtccttggctccgtctgtccgtgtggccttgctgccattccgtctgatcattaaacacagcttttgatacatatggcccggcctctgcctccgcagtgcacggcttggggcatctgctctgtgcaggtcccggtgagcagaactgagagctggcaggccgcctggctgtcctgcagaggacggattggaattgccaccgcagggccggccagtgctgtgaggtgcccagcgtcactcccatgggctctgtgggccatgtggtccctgtcacgcttctcagctctgccactgttgctggaaagcatcacagaccatgtgtaaaatgggccaaaataccttttacaaaattaaaatagagatggggtcttgcagtgttgctgaggctgatctcgaactgctgagctcagacaatcctcctgtctcggcctcccaaagcgctgcaattacaggcacgagccaccacgcccatccctcaagtaattttctcgccagaccctgaaattggaattgtatagcatcctcacgtctcaaaagagtttattattatttttttctctttaaaaatgcaaagacctgtcttagccgctttgggacaaggtttggtttccagctgctgctggctggcgctgggcctgtgggcacgtgggtgatggatgcgggtttgtgtgcgggccgagaggccagtgagtcctgagcatctgccaggcatcaggggctgctgtgtgtgttgttctagtctcacaaagttctccgctacgttagagaaagtgagacccaggctgggcatggtggctcacgcctgtaaccccagtgctttgggaggctgaggtgggaggattgcttgagcctgggagtttaagaccagcctgggcaacgtagcaagaccccatttctacacaaattacctgggtgtggtggcacacacctgtagtcccagctgttcaggaggctggggtgggagaattacttgagcccaggaggtcaaggctgcagtgaactgtgatcgcaccactgcactccagcctgggtaacagagcgagaccttgtctccaaaaaaaaaaaaggccaccagcaagcctctgaggccacatggctgtgagggatcagagacatggattcctccaggccctgagccaaaccacgactgcctggcagcgtgacgcccttggccttaatgtggaacagggtgaggacgcagcgggagatggaggctcaggccttaccactcacagcaaacctgaattcaaacccactggggaagggacggcttaatcacggaaagcgaattccagaatacttgaagtcacacttaggtttcggttttttaacttgagcagttcctcgatacgctccagaaggagcacccccaattgcctttccacgggggagctcactgctcggaggccactcggcgctggctctgaacacctcccctgtgtgcctctagtggtgatttgtcctgtccaggaaaagaaaaagtcgctatgtcattagctccggtggacctgagcctcagggctgaaagttacagtcaggactcagcgcacagagccctgggctcacaccacgtccacctgtgaccacctgcggtcgtgggcaagtccctctgcctccaactccctgtcctctggaaagagggttagtaatgtacctactgcaaggcacgacagccaggatgtcaccaaatcagccatctgattggacgcttagaagcagtcgggacttttgtgctagtgacacacttgattcaggaagacgggctcctgccaggctcagccggtgcctgagctccggggggtgtgcacacctcgactgtccaggtcacacacggtccagggatgtcagggagaggtagagctggggaaatggaa

SEQ ID NO: 581 - DNA, 218129 bp, Homo sapiens
  source 1..218129: mol_type = genomic DNA
cctcaatttttttcctatcaaaagtaaacataggttcaaacattcaaacctatgaaggcctaaaaggaagaatcatcttcagtttgctgtgacgatttcactgagttttattttaaaatattcatttaaaaatacatacaaacatataaacccatcaggccaggttctagtgatctgagatataagcatgatacaaactacttggctgccgtgtatttttgttttattttaatccaggtgatcaggtctgtatggggaaaaagccctggggctttttcaaacaggaagggccctcctccctctgaatgcccgcagtgccgccctgtgcactttacagaacaaggagaaagtcagtttcttcaaactgcttttctaaagagcgtttccattcgtggtcctggtgattccaccatcttttcttcacaacagtgacggttctggaatttctacacagcctgaggggctgacggggtagaccaggtgactgggaaggggcagtggcacatgacaaaaatttgaggaaacgtccagtttccgtttcagggaatgcgcataggggaaaacgcaagtccccacgccatcacggggccctccaccgcggccggacgacccctctctcgggagtgactggggcagggcacctggcctcaggttcgagcggagcctgcactgagaggcaggagttggatgaaccacttgtagggtctgctcccagctacccaaagcgaaagggtgggcgaaaaagcatttgcaaaagaatacattaacctcacaaggaacgacccccaccacccatcctccagcgcccaaggtttcccacgaagaggtcgccgtcgcccttctccaagttgggtagaacctataaggcatcaccaactgcatctcaaaccaaccaagcaagtgacgctccaaaacctccctaaataccctctctccccagcattccgaacgcaacatcaagggcgaaaagaggctgcacaaatcacgtagaaaattagaccgcctctttccatggcgataatcgaattagcctcaaattaaacgtgaaattggccctctccggctgtggagacaaagcccctattgtcctgctcgggtagcggcagcagcagtgcccaccccgccccggccagcctggtcggtccccgccgctgggaggatgaggtccgggctggacccgggaagagcctcagctggagaggacgtggacgcgcccgaggctcggctccctgggcggctgcggggctccgggcaggaggagagggcgggcgaagcagagggagcgggcgggagtggggagggaggagtgcggagggcggagggcgtgcgggagggatcccgggagtgcgcttgtgtgtgtgtgcgcgcgcgcccgccccgcgcgctcctctccccgcccctcgccccctccctgcgagcgccctcctctcctcctccccccgccccccgcgctcccgcccagcccccggaatcagtgccgctgttgccgtgcaggctgcggattcctccagtccctccctcggccgcctctcctcccggagcgagcgcgcagccctgcgcagcagcgcccactggtcccgtcctgtgagccccggccccagccgcggacagacccgcggagtcgcctcccggcccacccgcccggccgccgaggagcgggaggaggacgggaccccggcgcccccaccccatccccgggaggtaggtagggggcccgaggcagggagatgccaactcactggggctgcctcccgggtgggctccgcggcggcggacgggcgggaggaggggcgcgggcccagggccggaggacgccgctgcccgcctgccctgcgcccggggagccgcgtgggggcagggaggctgcaaagcccgggcgggggcggcgcggggagcccgggtcgcgggtgctcattggtactcggatgatgcgggacgaggggcggcaggctctgcggtgaggcggcagcagacccgccgtgcgcaccgctgccgtccggccccagccccggcgcggcgcggcgattcctcctccctgcctccgccggcgcctccctgcagccgggcgcggcggcccctgacgcggaggcccctggcgcggaggtgggtgcggagcggacagcggacagccggagggtctattttcaggtgccctctctgtggccccgcgggtggggagcgggggcggcggtgacagggccgggctctgcgcgtagcggtgcaggggatgcggccaggcgtggtcccggctgcgccgcgctgcagctgagccggaggcggcggccccgcgcccccacctccgccccatccctgcgcttgctaccctcgtgcgcccgccccccccccgccctttctgccgtccccactctcccagggctgggcgtgagccgcctccgggcgccgagccgccgctgcgcccgcccttcagctcctgccaccctctcttcaacaggtttgtctcagcgcagggaccctccgggcctgctttgggtaggtgggctggctcgtcatcaccccccacaccacgcccacggccctcttttagggggcgccttctctttgtttttgtgataggaaaggtgccaactgctgccatcagatgaggagggggtggggatcagaacgcaaacctctgtccattatttttccaatcgaaagccaggccagatagtaagtgaggacagggtgcgtgtgggggtgcttcggcggagcagaaaattgaattcggtggggtttatttgggcggggatgtgcttttttggcaagatggatggctcacggtgccctcgccgtgatgcagcacaatgcagcagtatcgcagcttccttggttctcgctggcggggcttggcacggccgctcggcgcctgcggcccccgcccggccccacccaggcccggggctgcccttggccgaggcctggagctgctgctaccttgtcctgcagcttctgctggatgtggcgtcaggaggaccaggtcagctaggtgtgagcaggggagagtcttttcttttgggatgatccctcctgcacctcttcttgggctgcgctctgccggaggggcgccctgcatcaccagtgcaggcagaggggagccggcctgtggttgcggatcggaatctgatctgcgaccaggggacctgagccatagggaggggctgcaggaaggactgggcccagtggtgtgcggaggcaatgttgcagtgtggggagtcgcagcgtttttctgtggatcgtccataatctgtaaccacaacccagctatgcattaattttttctacgtgaaaagttggtgtttattaattggaccttcacaactgtgacattacagtacctcgtctgtctttggttaataccaagtatgcattttttctgtaggaaaccatttttaaatgaaatgattaatgcattttgggttttatgtcactaagacatttataagtatattaaaattcagtaggttgttttaaaaggaatttatatgttttttaatggatagtaaatgattcctttagcttgtattttgttttcatcgtttgctttttctaagtcaagtacagttgcattatttggatgctttattaaggattattaggtgtatgagtgtcatgatgggggctaaattggtattcagatttctattgattgaggtagccaagttaagtgtccgggcgtaattaatgggattatgacagtaacactgcgtttgtgtttgtttatatgtattttttgtatacatatttttcacagctgtgactggggagagggtggagaagggcagaccaccaaggcctcttgactggcatctagtcagaaggagatggttcccagtgttctcatgtttagtctcggccaggacacagggaatttcccttctaaatgccatctctataattcattattcagtgtgggatggcaaatgggatatatttcaaatgtcaacccaggctttcctaaaatgtttaggtgaaaaaggaaatttcaatatgctagttggaagggaaggtcagtgtttacaagccaagggcgtgcctgcttgtatttttaaatatttctaatgaatccaagttagttgcttttgatttcatgtggctctgcagaatagaactgcatgtacattgtgtggtgtatgtgcgttattttgagtttctctaatagccattaaaatatgagactttttgtgctggttgtgtaaaatcgtgttgcgtacagatttttatgaatgttgttcccatggatcatccaaacgttttggatttactttgttgtaagaaatatcctgtgttgatgtcacaggaggtttagctgttctgacttacacagcaggtgcagaattctgttgggttaagctctttgtaactctgtcattactggagtgaccaaaaccttcatctgagaggagaagtattgggcagtgaaggaactgctgtcactaggtcgtctcccacagttgaggttttctgtgaagaacttctcttgggcaagactagtaacaactatctgtgatgttgcagagcaaatgagaagacctccctctacttgtgacacatcctgagcagaggcttggcattggcagagtttcctggaagggtttgtagagtggttgctttgtcttgatgtttgaatgtatgactttacatgtggaagtactattttgacgtggaaggattttactactgctaacatagacatgattagtggaaatcattcagtgtggattttgtcgaaataattttaagcttttctttttaatagcatattcttatagaacattttaaagcctaattttttttacgtgcaatgacatgatgctcctttaattatgttgcatcgtaactagtatcttcattataattgggctttatttaatggcagccgtagtttctttcactacattattggaaatgcaaaccattcttccagaaggaaggggctaactacccctgttagaagagtgaactttgtaggtctgtggaagtgagtaaagcatctcatgggtttttcttgtaaattttcagtctttgctttttctcagggcatcttttctttgcaaaagacctagtttagtactctgatttttccggtagcacttgtaattatatttaaatttttattgtgtgggaataacatcatctatttttttctactcagtggttaaaggaaattacaccaattagatatacctgtgtttctatttttaaacatctctggagaaggcattttcataatgtcctttgctatcatagtgaggttcacggaccttcaacattagaatcgcctggaagcttgttgcaaatgcagattcttaggccccactctgaactcagccaatcggaatcaacattttaacaagacctttaagtgagttgtatgcacattaaatgaagaaactctattctgttccttcagcaaagggacctcaatatcaaaagtttccttcttgaattttcctttcttttgctgaagtatcagcacatttttttccttgatggtggtgacaaaagtgaggctctcactgtaaattatttgtttaatacaaaattattttataaagctgttctttaattcttggtggaagagtcctatataccatggtttatttagattaatcagtgttttaggttgttttgtaaaacacctctaaagttgaaaaacagtctttttcccctctggaagaaaaaggcattggttttgagacatcagagctggagcctcggaagctaacccctgagcaaagggtcctctctgctccctctgctctggcatcttgatgtctgtcatctgatatagtcaatgtcctgccctctcgtccagtcttttcttagagttcttttttgaatcaactaattggtaggtacaaaataatgttcctaaaatatatgttaaagaatcgtaaaccagctgggtgcagtggctcacgcctgtaatcccagcactttgggatgccgagtgggggcggatcacttgaggtcaggagttcaagaccagcctggccaacatggtgaaaccccatctctactaaaaatacaaaaattatctgggcatggtggcaggcatctgtaattcccagctactcgggaggctgaggcaacagaatcagttgaactggggaggcagaggttgcagtgagccgagatcgcgccactgcattccaacctgggtgacaagagcgagactctgtctcaaaaaaataaaaatcataaaccaagggacactcaggcagccaccggctagttcaggaagagccttatacattcagagcccacctccatcatcccatctgaaacaacccatatccttgattttgtgcatatcattcccttctctatggtttatcctttttaaaaaatcttgattgtgtatgattttgaactttatatcaacaaaattatactttatgtattcttctgactcacatatttagattaagattctattcccaaggtttatccatttcatggctgtatttcattcagtttcacctgctgtatagtattctaacgtgatttatttattcattgtactctagatggagatttggattgattccaggtttttttgctattgtgaaagggttgctgtgagtggtttttgtacacggctcttggtacatatgtggaggcacacacacccatttgctgtctctagggaatgaaattttctggctcacagggcatatgcatcatcagccttagtagagaatgtagaactgttttttacaaagcgattatgttgatcgtgttcccactagccataagtgttacagttccaaagccttgccagtgcttcacataccaggcttgaaaatcttgtccagtgaaacattatctcactgtgatttttatttacaatttctctgattattgagtttgaatgtctgtttacattattaaccatttgggttcttcgttttgtgaagtacctgttcagtcttttacccatttatcttattaatttgtagttctgtatgtagattactactaatcctttgtggattacatgtcttgcgacaattacttctcagcttgtgttttttttcttaactcgaatttgtgatttcttttgatgatcggttatttgtaatttagcagagtcataatcagtattttgtcctttaaagtttgtgagggtaattttcttatttcagaaaagtttttctttgtttggaaagagcattcgttttggagtcaaacaggttgtgggcccaaatcctaatggtgttgtatactagccttatggctaccactaggtactggccttgagctagttagttactcaagaccacagtttcctcattggaaaaatcaaaataatattagtttctcttagttatgatacagcagtgtacagttccaggcacatagtacgtatttagttgataacagttgtttcctttctgttgggactgcctaagcactatgacccactgatcccttttggtatgctttgcaaaaactacctaaacctttttatgtcaggagagctattaaatggcttattctaacttttgtattttaaaaggctgcattaccaatggcatttatatattgattaatacagtctgaagagaccacttactagaaacccttatcagtttaggttctggttcttgaaagtaatgtaattacatttatttgtacacagttcttttgaccattaagcatttatagtattaatgatcttcctttactgctactctgagattactttgtaatattgttttttatttaatgaataattattggatacattatcttgccaggacttgaagttgttatggttttgtggactggcttaaagttgaataagaattagttcctgaatgaaaggactgtatactctagtatatggaatatattttatgtactatacacagaaggtaaaatacctttaacaggctggatgtgtgactttggcaaacctttaaccctccggtctcagatctaattttataaaatggaagacttagatgaaatcatagtgggggttaaaacatggcacatgccatcactcgcttctgttcctggcagacatcgaaaatcagtaatggtactctttttccactgagctgagatagtctcagtcatattctcgacatggtgttctaggcagtaactaccactcgattaaatctggcattcagtttttaagctcctgtacacttctaaattctgtgattataagatacttgagaaactcatcaccttggcagtgttcagaatacagtgagactggaagaaactagaagcaaggagacaggagagaggtgactgggggtccagaagtaaagggagcaagttacagtggtggccaagggaacaaggagaggagagatgggaaaatggttgtgaaggcccaatcctatgcgaagctatttgtagggtaaatggatggcaggatggatgggaggtggacctagtgggtgacgagctaagctaaggtgataaagatttcaaatttgaataatgacaatgagcatgtttggtgatgatgacaaatagacaagtcaagtgcatgattggatatttgattgggaagagtatcagttttgctttaaacatgtttgagtttgaggttccagcacaatcctcagtggagctggagagaggtcatggctagagaggctgatgggaggctttggatggaggggccctgggccccaggcttcaggctctttacacaacccacccacctcgctcacacgctaagtgaccttgggcaaactgcctagacttctttgtgtccctcaacatcttcatctgtaaaatagtcgtaatgagagtatctaccacataggattattaaagccaaatgaggtaattcagcgcttatcacaataaattttaatgattataaaatgtggaatttttgcttagtttgacttaatattatgctttctttcaaataaacagtttgatttgtttagaaaaggtatattctagcaaataacaatcatttagataaataatgctaagttccatctgtattaaacctgttcctatacatcatgtcaaaataataggaaaggaaaatctgatttatatatatgtattttttaaacaaacaataaaatgctaaagccttagtagctaaggaaatgatatgagcagatagtttataaaagaagaaatcaaggaggtcgataactgtaagttcaaactcaccagtgtatgaaatacagactaaattaattaatttttccacttaatggatagatattatgctctgggctgctgtgagatgggagctctgcatcacctgttgagagcatattttgattaatacaaacttaggggaaaacagttgggttatatatatgtaacagaagccttaaatgcttatacctcttgaactgaaatctcacatgtagcttggtaacctacaaaaacaattaaaaataaggacaagtttttaaacaaggattttcttggcaacattaatagagaaaaggggaaatgttttttaatggaacataatcaaataaattatggcgcaactgtagggtggaattcaatgtagtgcttaaaataatggtttggaagaatattactgagatgggaagatgccggtaatacaggggttagtggaaatatctggatgcaaaattgtatagtgtactataatcctggttttactgtattaagtaaaagactggaaggaaatacattaaaatgttaatggtttgctttggatggtaggttgatgggtgatttcctctcttgtatgaaaggaaattcccatgacttaatgtttctctttttgagttttgaaatatttcacggtagagaagaatgcagtaaataatataatagatgaccatgaggaccatttgttttggtttgtttgaggaacttttttttgttttattttgttttcttttgttttgtttgagacagagtcttattctgttgcccaggctggagtgcattggcacgaacatggctcactgcagccttgacctcctgggttcaagcagtcctcctgcctcagcctcccaagtagttgcaggcgtgtaccaccacacagggctaatttttaaaccttaaatttttttatagagacgaggtttcaccgtgttgcccaggctggtcttcaactcctgaactcaagtgatctgcctgccttggcctcccaaagtgttgggattacaaatgtgagccaccgtgcccagccttgggcaccattttttaataatcaaaaaagcaatcaacactttaaaaattctaatttttaaaaaggaaagaaaaaagtaaatctgtccaattgtagatcattattaagaaatagttttaaatccagcgattgttatatctgtccttctttgcagttttctaagagcaatgatacagtgtgtaagttagcatcttaagggtataggtgtgagataaattagtgtattcaaatgtattaattctctacactaacctaggcagcttgaaaagagcagaggaccagggttctttggtatttccagtctccacacttgagtgcagagcagtggaattccatgacgtgcatgttctcactcgtggaaacctaaacactgctactggagctagtttgtaaccattagaccatcaggtttcagtggaattggtcagaaatgaaggtaaaattccaagtgaacattttaaaataaaaatcacttcagatttagatttactttcagtgaatggtatctcagcatctgggaatattgtaggctaagattgagaggaactaattttaatattcttcgttttttgtatgaaaagaaattcctgtgcaatgttatatttttgtatatatacatatatgatgcatacatatcatgtttatctcatatatatatatatatatatatatatatatctcacacatgggagagagaggtgtgtgtttgattgagtaatctctaccacgaagggaggcacatattttaaaacattttaaatggggaattttatagagacagtattttgaaaaggagtcccatgaatgagtcaagttgtccttagccagtggaggaaatgtttgggagggaatagtactttctattttatggtccaagtctctaagtgtgttggtactttgtgaaatgtagcttataaaaattaatgaatttccattaattttgtattttttctgccatcagctttaactgagtggttgtttgaagaagctttcaggattaattgtgctttgacatataaaaataagatgttatcaagattgctttaaaactgacccttgtttataggagtcatacgtccattcttaagaaactctcaactgtgacagtaaacatctgagtgatttttagaaccattttaatatctctgctctagaatcgagaatgccctgttagttctgatttttaatatacaaatttgaagccactagttaggcagtaaaatatgtattagaacataactatagatttttacccaatagatcaattagtatgaaatttaggatgatatataagtacaacagaatttattcctttgaggtatgtattttcaaagtgtaatttgtgtaattaagtatgtttattcttcgagaccatcctggctaacacggtgaaaccccgtctctactaaaaatacaaaaaattagccgggcgtggtagcgggcgcctgtagtcccagctactcgggaggctgaggcaggagaatggcgtgaacccgggaggcgaagcttgcagtgagccgagatcgcgccactgcactccagcctgggcgacagagcgagactccgtctcaaaaaaaaaaaaaaaaaaaaaaaaaaaaaaaaaaaaaaaaaaaaaagtatgtttattcttagaaagttcatgagcctattaacattggttatcttgggtaatggaattgcagaagatttcatctctgtatatttttttctccatattttttaagttttaggaaataacaaattcttgttctttatcaaaaatatcctaacacttctgaccaaacctcattttagctggatacaaactaatcaaataatttaccagctaaatatactttctgctgttcaatttttttctaccaaacttacggaaaagcagtattaataatgaagatataaagaacactgaaatttttgaaagatcttttcattccttgtttaaatgttcatttttgttacagccttggcagttcattacttatgcagagtgtgggaaaagctctaagaactggccgagagagcgcctgacagaaacattgtccaggaggaatcagccactaatggccactgcctttggctctcggtgaagtttcgtttccctacagtactcttgggtggctgtttcagggatacattttgttctagtgtgtttgcctcaaggccaaatataaatgttgaagggctgtacatttttctggaatgttcttcaccagctgtaaagtcttgggctgggatagggataggggatttttttgggggtgggggggcttttttctctttatcttatttacttgaatgggaaggaaaacttagattcttccttaaaacaatgttatttattttgatctgtgatgtttaaacattttccacggcattttgaaacctgtaaacataggagtactttgttgttgctgttgttggagacaaagtcttgctcttatcccccaggctggagtgcgatggcgcgatctcggctcactgcaacctccgcctcccaggttcaagcgattctcctgcctcagcctcccgagtagctggcgcctgccaccatgcccagctaatttttgtatttttagtagagacgggtttcaccatgttggccagactggtctcgaactcctgacctcaagtgatccaccctccttggcctcccaaaattctgggattacaggcgtgagccaccgcgcctggccaggagtgtttttatagtgattacaatagttttaaaaattaaaatagtctttgtatttttaccaccttagaatccctgatttttttttttaaatttctgctaatacacatagtatatgtggttttttgaatggcttatgaagactatataccatcataaaggcataagttagtataaaatcatcataacaaaatacaaaagtatttttaagatatctttttattactgaaataatagatgttttagatcatatggaaactaaagatgaatacaaagaagaaaattaaaatcactagatactatgtgaccccggaaacatacagttaatattttagtgtttctcggccaggtgcggtggctcacgcctctaatgccagcactttgggaggccgaggcgggcagatcatgaggtcaggagtttgagacgagcctggccaacatagtgaaactttgtctctactaaaaatgcaaaaattggctgggtgtggtggtgggcttctctagtcccagctacttgggaggctgaggcaggagaatcacttgaacccaggaggtggaggttgcagtgagctgagaccgcaccattgcgctccagcctgggtgacagagtgagactcagtctcaaaaaaaataaaataaaaaaataaaaaataaaaaaataaaaaaatatgtgtgtatatatatttatttatttattttagtgtttctcttttaagccttttttttctgtgcatgtttcttcatctcacacatacatattaagggccaatcctccaatcttaaactgaagatgtagagttttgacagtctctataatgacatgatgatgttcagcactcttgcagcttatgcatgttgcatggcaaaacataaaatctaatgactggtctatagttaaagctgtagcatgaacactatctgttgccctgagctgttttaggggtgggatgttaaagaaaaatggaaaggaagaaagaattcaaaaatttgtttattatagctgtttctcttttatgaataatgtctttttacaatggaaaaataccagaaattaaattctcattagataatgtgctttctgttttgttctgaagggaattcccatcacagttgcattaattcccctgagagacatctccatatgcttcggacaacatctgattttacttttgtgttctgatttcagagtctttgaaatacctatcccataatgtgtcgcagtggaatggatgtggttattataatcttggttttaagtgtaataaattttactgggctgggtttggttgtaactgatgaaagcatatactagagctcagctttcttggggtctttgtattagctggattctttacaattctatcttgggatttaggatctgtttcaagaagaaaaagcgttatttctatttgattatgcaagccagttctttaagcctttaggacatcagatggatggaggtgacttgctggcctttgttgcctttaactctagtattcggcttctttctgaggaaggtgccaaaacggcttccgtatctgctgaaggaaaagagggagtgggaagaggggagaaatatttcattggaagataaaaaaagctctttccagcaatttcctttagaaacttgggggttgctgttagtctcatttgggtaatgggccccaaggaaaagtgacaaatggccttcttctggggtttaaacactaaaggtcagtgttggcccttttcacagttaagagggaaaaatctgagctgggctgggtggactttctccaactaagggattcttctgaaactcctaacctgatgggaatcattttgtttgcaggtggccaaagcccatcaagggaaatgcttgatggttactgtgcctgagctgcctgaagcctggtgtaggagtctcaacttgatcttgaggcagctgcaaatgttaggtcttgacacttgggatggcaacaagaccaggcagtgcccagagtggtcccagcggcctaggttagaggagggtagggggctggaatgtggccttagccagtcctctgagcagatgagaatacctgtcactatttcaggagatgagttgtggtcagagatatcagtcaggtgacttctctgagaggggcctggtccttctcacagcaagattgacaagtctgtgctgccagttgtccctaaatacccaatttatctcctggggtggagttggggaagtgcctctagcctggagcaaagagatctgcctgccatttcggaaggaaagaaaccagcacacatcctgtctttcattctctgtttcaaaggtaggtttttgtctgtttgcttgtttttaaatcaacacccagggctaaaggaaatcccgagtttccctgataatcaggatgatttcttattttgaaaggcctattttgccttcgaagtgtgtgtttctgacataggtttcatcctagttctagaaatcttgcttaattcataaaaggtaaaagtttaattagagagaaggctgatgtatcgtcttgtttcaaagggagactattcttgtctgtcatttgaattttttatatatattttttccggctgtgaagaaatattttattggtacatgtgtacatgcattttttattcttaattatagtatgtattttcactggactacactcttgttaaaggaaactttgttcacgtgaaataaacctatctttagtgagtcatacttgagaactgcttctcagtctcctcaacttttaaagtcagtggtatttcatgtaaagagtgtatcggtagctggcctatctctggaatgttgtgcagctgtgcagagcgtgagtctcaaatgtgctaattaaatatgttttttagcaagaatggaatgtagcagcatttgaatggcttcaaaaaacattccattttgtttctgaagagggcttttttcgtttttgccaaatattaaaaattagagagtacactgacttttagaggatgtattgctatgttaaattgttctgttcaccagaacagggtggcatgtgcctgtaatcctagctacttgagaggctgacgtgggaggatctcttgagcccagggcttcaagactagcctgggcagagtagaaagaacctgtctcaaaccccacactgttcttttcgcagagttaatggggctcattaaatactgagattatcctttagaacaatcttgtccaacctacagcctttgaatgtggcccagcacaaatttgtaaactttcttaaaacattatgagatattttttgtgatatttatagctcattagctatcattagtgttttactttatgtatagcccaagacacttcttcttccagtgtggcccagggaagccaaaagattagacacccctgctttagaatgtactcaattaataatcttcaaaatgtagggattaggtggggtggctcatgcctgtaatcccagcacttttggaggccaaggtgggaaaattgcttgagcctaggagtttgagaccagcttgggcgacatggtgagacctggtctctacgaaaacaaacaaaaagaacagaatgtaggcagtggtggcatgagtaaggttctaaggtttaccatctttagttgatcttgctcatttcccttggtatcagttctccttccttacttggtgagtgcttaacctttctttgggcagtaaggcatgacatttctccccaggttgagcagttttctgatacatattttttggctgagtgtgacttgtatctttttggactaagctccattcactcagatggtggtctgatttttttttttttttcagtcaggcattgtgcaaagtgacctgatgggaataaatggcaggttggttgtgtaatgcagcaacatcttacttggttgtctttagagataagtgggacgtgattccagcaaggctgtgcatcaaatgttggaatgtgttggagaactgccaagaggttgggagcaagctgtgtgacaagcactaatgcagccttggcctgccttaaaatagctgcaggttaacaaatatcttgaaacttggcatttcttttgagcaaaattgctcctctgaatgtgttaccaagaggtgctttcctcttttttatcgatttttttttttttttttttgctgttccaactgtcttaaaacatcttatgagcatatgaagaagatataattctctgtaacatcttatgttgaatgattttactggactaattattagcacattatctgaaacttcacttgtagttcttctgctctgctcacccaactcactgaaaaatatatagtctttgtagtttgaataaaaactggggccctgaagatgtttttttttttttttttttttttgagactgagtctcgctctgtcgcccaggccagagtgcagtggcgcgatcttggctcactgcaagctccgcctcctgggttcacaccattctcctgcctcagcctcctgagtagctgggactacaggcacccaccaccacgcccagctaattttttgtatttttagtagagacagggtttcaccatgttagccaggatggtctcgatctcttgacctcataatccgcccgcctggacctaccaaagtgctgggattacaggcatgagccactgcgcccagcctgaagattttttttaaaagtcctatattttatatgtttgataggcttttggaaaggaattattgatgtttgaacactaacacattagagaggcagagtcagaggcattggttactttgctgtggaatcttgtcttagctgattcacttttagacttcttagtaagctcattggtagtttgtctgcagtacttagttcttgtttgtaattaattcactgtctaactgtagtctctcaatttttttcaatagaaaggcttgttttttaagtcagagtggtaaaaacagggggggttgggagtggtctttgaaatgggtcctgtacagacttgagcctgatggtgatgtgatcaaggttgcagggggtgtgggtacctgggtggggctggggctgcctgtgggactaatctaaacagccagttagtttgggtgctctgaatatgacatttttaaaaatgcagtatttgggttaatgattggaagtaaactaagaatttccaggatttatatgttaaatagcagatgaaaacagtgagttacatgttaaatagtagatggaaacagtgagttaactttattttgagaggcttaaatacaaaccaagtttctatactaaaggatttcctaaaagatgatattaacagatatgttaattatcccataacttaaagtcctttagacgtttagattgagactaattgtgataatttcatagctctgtagcgtatcctgaaaatggctttgtttcttttgtttcactgtcttcatatgtgtaagtcttgaattttgctttgtcactttccgtattttacatgtattttagaggtcctctccttgtatagaaacattatttctggttttatgtaagtgccttatacagagatttataatttgtaattactgtactttttggtcaatagaattgaggttatttggggtatgtttttagaatatgttaaaaaccatattttgtgtttttataacatagaaaaatatttcttggaaaatgcgtgtgtgggcagcttcttttagatgtattgatcttttcactttcagatggcaaatgaattctatatggcattgttgccatgttggaaaatttctttattgagcctatgacttctaaagtatcaaaattctgtttttgcttttcccttttattggacatctccagttttgttttttttttaagcacacacgcacacacatacacacacatccttggataactgaactggtaaattgtattgaggagaggtgaactacaggccaccatttcctttttacttagcataccattatctggtcccctcatgtgaaaatatattttggatagttttcacctcccaccatctattaatttagagtgtgcattcctttaaccttgcaggagaattcagtcattcattatacgataagcaggcaaaaagttaaatactcaaatgttccttttctggattattgtctgaattagaaaaacattcattttaaattttacacatgtatatgggatgttctgtctcctcgtctgtatgccttgtactggcacaagcttataggactaggaacaaataagcttagcatttaaaatattccagacataaaaaatctatggaatttgcttatatctactgggggatgcagtcagacagacccagggttttaactggctccttctgcagtgtgaaggcagacggaaacattggagtctgctgcagatggcagcagggtggacaggtgaggcccacatggaagttcataccactggtaggtggagtaatgagttggtgtatgaaatgctagccattttagatgtttctacagctgttgttggctagctgaaaataaattgaacttgttgaactggtaaaagttttgctgtctgaataggcttagataaaatagtgcttcagatgcctataaagatgtctattgtaacattactatgatttttttaagtggtgataacctaaaagtccatcattggtaagttacagggtggactatatattctggaggcaatacagtgtgtagttaaaagtgctgaccgtggagctgtggtgcctgggtctaaaacctgatttcaccatgggcccactttgtgaccctgagcaagtcattaacccttctcggtctcagtttcctcatcagtaagatcaggataatcatagtacagaccatatagggttggttggattaaataagttataggtaaagcagttagactagtgcctggaaatatgtaagtattatttactatattaataaaaactttaatattattatggaataccttctaataacatgggaaggtttttaacatagggagaaaaagcagaacacaagattatataaatggaattaccgtaactatgtagaaaaatatacaaaagggataaggaaatactacaaatattaaggtttttgggggaggggagaatggatgagattccttgtgatttttgcttttgtctcagagctgttttgtattttctgctgttctacagtaagcatatgttacttctataatttgaaaaagtaaactttgttttcaaaagtggatgtaggctgggcgcagtggctcatgcctgtaatcccagcactttgggaggctgaggcgggtagattgccttcaggtcaggagttcgagaccaacctggccacatggtgaaaatacaaaaacacaaaaaattataaaaatacaaaatataaaattataaaaatacaaaaaattagccgggcgtggtggcacatgcctataatcccagctactcaggaggccgagtcaggagaatcacttgagcccgggaggcagaggttgcagtgagctgagatcgcgccactgcactccagcctgggtgacaagagcgaaactccgtctcaaaaaagaaaaagaaaagtggatgtatcccttgcaaacggttagtttgtcaattataagaacagcttattctttaaaagcttagggccttccgtttggcaacagtttgtctccttttggttccataatacttccacattcttacagaagctaatgggaaatgctggattaaaccacattatctatgctgttatctatgtttagaaacttttaatgatgacagatatgcagtcccttctctctgtggtcacatgggagaatcactcttgcctgctccccttgcattttggtggcatgttggactagttctgaggaatggcctgtgtccagactgcagccagagtccttgagtgagaatggtagagcctcctgctaccatgtgacaggcacgtaacatgagtgggaaacatgcttctgtgagtttgagccacagaacggcattcttacagagtgccttggagtaatgaaactcaaaactattttttaaattcatcatttagtattttccactaattcagactcattgtttagtgaaaagaatacagccatcggtaaggcacatgactgttattaacagtatgaatttagacaaattatgtaatagagttttagttttcttgtgtcaaaggcctcacctccacaaactacaaacaaaacttttgatgcttcaaattagtccataccagagtgtttagttttaattcactgctctttagtgcttgaaatgagattctttagaccaaagtggccttaaaggttcattcttgttgtatgcttattccacatttctctatatatttattttgtcacttctggtcactatatataggtttatttaagaaaaattcccttccatagtttatcaggcaggttaggctggtgctgcagtaacaaagatctccagaatctcggtggctcaaactcacagatgcgtattttccactcatgttacttgtccgtcacatggtggcagggtgctctgtgccatcctcactcaaggacggtggactgatgggctagatgcaggccattgatcagaataatcaaatgccccgcccaaatgctagggtagcaggtaagagtaatcctcccatgtagccacaaaaagaagagactgggtatgtgtgatcattaaaagtttctaactaaacatagataacagagtaggtaatatggtcgaatccagcatttcccatcagcttctttgaagcaccagttttgcagtatgttcacatgtactgttgataaagggcatctcctggtcaagtaaatctggagaatgctgggcttaataacatgtactaggcctctttagtgaaggtcgtctccgagctgttgtatcctaacaggcattctggaggtggagagtaacatacgatgtttcccaaacttacctgacctttgaattattttcttacttttcatagcctctctcggatgcaggttttgttgaacatgctttgggataccctaatttgtctaacttgttctcatacaaagcaagtatttggaattgcattttaattaatacttgcattgggaagaagctttgtttttattgtttgttaaaagagttgactatttgaagagagattttttctattgcaaatcaaattgcaggcagtgtttttaaaaattagttattactggttacatgcctgtgttgaatccataggactttttcttcatttagttgcctttgtgttctaaacttaccattgaaaagagaaaggtaaataaactttgaccacatatcttagtggttataaaaaaattaaattggtttggacagatggtccaaacacaccgagttttttttttattggcttcagtgtttttcttggttctctttgactttctgtaacaagttttctagaagttttgaaatgagatactactgaaatgagggctctgataagaaacagagagataacttttgtcaagaggtattaaatatttctctaccagaagactttggatttaaacacaacatttgttgccagggattttatgcctgcgtatgtaacaaatcttagtatggaagttttcacttaaaatggctgtaaacttcatgtaataaactttaggtaagaaggagcagcctccccaacccccgttttgtaactgtacatgggtaaaacttgataaagactaaactctctaactccccagactttcggatttgtggcattacctttttttttttttttaattaattaattcactttctattagaaatcatgttaaatccaggccaagaattcttttttcattttctgttttgtttgcttttttcctttgtgagtaaacaggtgcgaaggacaattgctgttttatgacaggaaacacacttttaaagctgtcagttacctcacagccccaccctacccttttcctgctgccattacgattaagactgactggtaggctgggcgcggtggctcatgcctgtaatcccagcactttgggaggctgaggtgggcggagcacgaggtcaggagttcgagaccagcctggctaatatggtgaaaccccgtctctactaaaaatgcaaaaattagctggcatggtggcgggtgcccgttatcccagctactcaggaggctgaggcaggagaattgcttgaacctgggaggcggaggttgcagtgagccaagatcatgccgctgcattccagcctgggtgacagagtaagagtccatctcaaaaaaaaaaagactggtagtagactttgctttttaaaggtgacttgggaggatttgaggcagagaaaaccttcttcagagccacagttcccagtcttatcctttttgttgataccagtattgtggaaaaagcattcatgacccatcacaaaaacatacattaagaaaacatttttcacatggtctgaggctgacaggaatcaggcttaatgtatccagggatatgacaaacatgggaacctgcaccagttgccacagagctgtccgatcctggtcccagggcccttgtctgtggcaggtcttccccggggaagagatttcactctcttatgagaacgctcgtgtttcatgccctcagatgcttgtgtcaggttccagtgatggtagccttggagtaagtctgcctttgagagaggattgttttttttcctcactcttcaaggacctgtagtgggtcccctgatgggccaccctctggacctggtcaaatgttggggagtttcgtggaagagcagtgttttcacattacagggtgcagctcacagtcagaaagattgtagaggatcatagaattggaagttttgggtctgggccgaaccctgtagatcttagtacatccacatgattgtatcaaagaagagtccagagctccgagaggctaggtgcaatcacacagcttcacacaagagtaagggctgaaactattgctgttaacagatatgtggaagtacttggtgtccttgcaactatttccagtgtgctgaaccttgaaaggcatcttacttctgctaattggaaccacttgggatgcattttaaaattatataaatgaagtaagcctacaagtttatgctcatgtttactgttttcatgttgtcaaactgttaatagcatgaatggttaaacatttgctgggaaaatagaaagtgttctgaaaatacacaataccagagataaaaaaagatgtatgtacgtatatgtgagtgtgtgtgtatatatatgtgtatatatatatatgttttattactagggaaaggaggaaagcccattgtgtatggaactaaaagccagaacctactgcatgtccacctttgttttaataaaaataacaaacaactgagtgtcctggctgcctggccaggctgaaggaaagtaaaggttgttttaaaatagaaaaagatctggttaaatatttgaccagatactttgattaagttgaaatgtttaaacattttcaggcccagggatgtcagtgaaggctgactgcagagtcttctctgcctgcagatgacttgtgttgtgtatagcaatgatttaaaggcaaataaagtatagttatagaaaacatgacccttaccaaccgcctcccccccaagttggtttgtaaccatgtaagaaatctaaggtatgattggtaaaattaaataaataaatcccattgttccagtcctcttctgtggaaggtaggacttgggagggagtattttacagtggttaggttctgtttcttggagccacactgcctggttggaaccctgcctctgctggttactgactgtggtctttggtaggtgaacacataatttattatccaaactaggtaatttatgagaatgaaaggagacacttttaatagttgtaccagtacagcaggcataaactaggaaggtctgaggcaaaccagataacatggtcactctagtcttaacgaagttacctaatcttggtgtcttggtttcttcacattgtggaagggacatgactcacttcctagggtgttaagattaaatgcaataaaacatgtaaagttttgcaatgttgtttggcacatagctattcaatagttgtagctatttaaaaaattatttagggtacttaattcatgtaataaccatttaagtattcagttcgctttctattatctttatattatttctcccaagcaaattttgctttttttttttccaagaggcaaggtctcactgtgttgcccaggctggcctctaactcctgcgctcaagtgatcttcctgcttcagccttccaagcaaactttgcttttaataacattaatatttactaatggcttattccatttatggcacctgctcaaacttaattgcttgctttatctgagccctttcctcagataaaggctcagaaagtaaaattgacttttactttttcagctacgtgtatatgtggcacttaattatataattagcacctgtggcccagagatgggtgctgggtattgggacactcatttatcaggttgtgtgtaattagcatctacactggaaagcaccttttgaacagctggcgctgagatacagaatggttgggaggttgagtgggtggggagtggcaaagcccaacctcttctgcctcttttaaaagttggatttttcccagagtagtgatatgcagggttgccagatttaggaaaaacaaaatcaaacaaaaaagaagccagaatgcctggttaaattttaatttcagatgaacaacacatcgttttttagtgtaagtttgtcttatgcagtatttgagacatacttatcctaaaaattcattgtttatctgaaattcagctttaacttgatgtccagtatttatctagcaatcctagttttgtaatccgaaagaatttttattctattcagtataacccacattcagatgtatatgaaacatgtagtccagatccttttataagtattgtgttaattttttaaaaaatccatgttgtctaccctccattggaatggatggttgagaagtcatcactgagttgctgctgctggttcccacaaaggccaagatgaaaaagaattcagtctggtttgccacagcagcagggatttacatttgctctttgagaacttattggctgtgaatgtggatgaacttaagccagctcttcttccttgcaggggagtccattagttaaggtgacttattgaagccctggccagctctaggagttctcggttttataattgaattactttagtaatattaaataatttggggagggggttaattttgggtcatttatatttcacttgtcaatgtagagggagctacttttattgtcattaagagtgacattcatcctggtgccatggtgagcacctgtggtcttagctacttgggaagctgaggtgggaggatcacttgagcccaggagtttgaggccagcctggcaacaaacaaaatccacatctctaagtaataatgatgatgatgataataaaatcctagaaatgaagaacaggtttggaaaaaaaaaaaagtaaccttcagatactcttcccattagaatctctcttgctgtttttgattttcagcagtgctgcccagaaagtgctggtgagctttttgccccagctttggaactctatcagcagtcaaccctgaagggcatggcatgcctttgggaaatgctgattggaagattagaggctgcagaaacctgagtgtgtgtgtgtgtgtgtgtgtgtgtgtgtgtgtgtgtgtgtgtgtgtgttttgttttgtttgtttgtttgtttgttttccaaactctggatatgatgcctctgttaaaccaagtccctgaggaaaagcttcaccagattaatgatacacttggtgaaattagtaatggcaagtaaaggttgagatttgtgcctgctggacaagagtgagccagagcaaatggattttggaccaataccggctttttaattgctgccatttaaagagtttaatgtccccagtgaaaaagcacaggtttcagataatcttttgaagaaaaatgcatagtggtaagagcttactgttaggcgcagagagtgtgtggatgggttagccaagggaaggaatccaattaaagctgtttgttcggagtactagatttggaggtgtgttttattgttaactggtaactttccagaaaatgaattatttgtatataaagattgatactagccaggctttatatactgacagttatttgtaaaacctctttgcttcctccttttaccttcttttctgagctgtctcttttcctccgcatggcttcctttataaagcagcccattttttggacatggttttgctattgatgagcctgaggtgtggcatagtaccacaggattgcatgatgagtgggatatttggcctcattatttacatggcttagtttttggtgtttgaagtgcctggtcggatagggattgactattaatggtagacattttcacattttggagcactgatcctcaatcttggcagcgcattggcatcccctgaggagacttaaaaaaatgcaggtgtcagccgggcatggtggctcatgcctgaaattccattgctttgggaggctgaggagggaggatcacttgagtccagaagttcaagaccagcttgggcaacatagcaagacctcatctctacagcaggaaaaaaaaaaaaagaaaaaattagaaacaattagagaaaaaatgcagatgtctgggtcccacttccagagaatctgattgaattgtctgggatacagaatgggcaccaggacttgcaagaggtcctcaggtgattgtaacataagccaagtatgcatgctatcctctggcctcccctcaaaattatgtctctggcctgtgctgtccagtagggagccatgagcaccaggaagttacttatgtttatgtgaattaaaatgaagtaaactgaaacttcatttcctcagtcacactagccacatttcgaatgctcagtagccacacatggctcatggctgccctgttggatagtatagatatagaacatttccatcacagcagacagtttcattgggcagcctagatctagggtgtcaacaaaacatgggaggagcatgaacatttaagaagcctgacacaggaaggacaggcttggaataagtaatcccacaggacttggcagtactgagtcactccatacttttttaagcagcctttttctcaatggtcttttggcaccagaagccccacagcagttggtgcaatggattatgtgtcacatcttacagaaaggccccgtttaaagcaggctggcccgaaggggtgtggtgaggactgggggcaggcaaatgtgaccctgaggaggccgggccagggaagagagaatgcagctttattctttcagagccgaggaatgccctggaagggaaccgaagcctgagtattggggttaaactaggtgagaggagatttttatctcttctgctggagaaagacctgcctcaatagtttgcctctgctggctcatctctagtgtgtgggaaacaaggacagtgctagcacatatttcccgtgaaataaactcccattatgggcccccatgttcttggagcactgggcaccacggggttaagaatggaatcaattatgttccatgtttgttcagacatagcacataagatccaaggaaggtagggtcacggaaaagcgaggggttagaggaaacatgaagtgtataccaaaggatgcggattttctacccgttgcttccctcagcaggacctttttggagattgttcctcctgcaggcgtgagaaaccctcacgtggagaggctgtctggaagcccgcagtctggtctgtaccatccaggctctttgctgtgccttcctgtctcctgcatttcgctggacattagcacctccccaggagcagatttctgttgctttctgtgagcccactataaagaaaatgccaagtgttcctgggcacaggaagtgggtaggaagagctctgagaatgcatggatcaaaggcacttgggtgatttaggggtgtgacccccagtggcttcacagggcctgtgagtcatttcaaagagtttctcctgttttgtcattgtctgctgttaaaccagggtgaagtttaagtgcctgttgcagaccttattgccttcttgctttgttccgctggtcaggttagtgttcttgacggggttgtatccaaatatctgtattggggctgggcatggtagctcatgcctgtaattctagcactttggggggctgaggcagtcagatcacctgagcccaggggttcgagaccagcctgggaaacatggtgaaactctgtctctgcaaaaaatacaaaaattggctgggcatggtggtatgtgcctgtgccttgggaggctgaggttggaggattacttgagctcaggaggcagaggttgcagtgagctgtgattgcaccactgcactccatcctgggggacagagtgagaccctgtctcaacaacaaaacaaaaccaaatatgtctgttggcaagtgataactgcacggtattaactgcctttctctgagaaataaattatcggggccctcctaggacttttatatgcttgggaattgtgtttattttcctctcattcacttcagtcctgctcttgactgccagaagaggcctgctctccttcctttcccattgtcagtaaattttagactttttgttagtactcatctgctatttttaattacatttcacacttttattttgccattttctatattctctttcctcaagctcagagagcaaggtaggaaatgttaacttctcctaagaacaggaatatgggaagctggaaagccgaaaaagaatgctaagaggaataataggaaagccagcgttgatgacaagtgtcttctgtagttgccatcctggtaactcttcagggtgccactattcctctatgcttatggatgtttgaggccttttataggatagaatttcaaaggacaagtagagaagtgttaactcctgggagtagttcgttggttttcccttcatccttttgcctgtacccggcgtggggtggttgtgtcggagacaagctcccagaaaggcgcaatgtggctcattccaggcctcaagcaccagaatacgtttagcttcaaaaatgacaagtttgataagagtgttcagaccaagaaaattaatgcaaaacttcctgatatagtatgtcagcgctataaagaagttcttgagtgtcgtgtaaaatacaaaaaatacaaaccattatcaaacctaaaaaatgtgttaaatgtttatgaaagacagtgaaggattcttatcacacagtgtgtagaccatgcgcctatgaacttgaagtttgcacagaatgtggaaagaaagaagacattgttattccgttcagtaaggaaccagaaaaaataaaatattgaaaacaatcgcctctccctctccctctccctctccctccgtctccctctccgtctccctctcggtctccctctccctctctttccatggtctccctctgatgccaagccgaagctggactgtactgctcccatctcggctcactgcaacctccctgcctgattctcctgcctcagcctgccgagtgcctgcaattgcaggcacgcgccgccacgcctgactggttttcgtatttttttggtggagacagggtttcactgtgttggccgggctggtctccagctcctaaccgtgagtgatctgccagcctcggcctcccaaggtgccgggattgcagacggagtctcgttcactcagtgctcaatggtgcccaggctggagtgcagtggcgtgatctcggctggctacaacctccacctcccagccgcctgccttggcctcccaaagtgccgagattgcagcctctgcccggccgccaccccatctgggaagcgaggagcgtctctgcctggtcgcccatcgtctgggatgtgaggagcccctctgcctggctgcccagtctggaaagtgaggagcgtctctgcccggccgccatcccatctaggaagtgaggagcgcctcttcccggccgccatcacatctaggaagtgaggagcgtctctgcccggccgcccgtcgtctgagatgtggggagcgcctctgccccgccgccctgtctgggatgtgaggagcgcctctgcccggccgcgacccgtctgggaggtgaggagcgtctctgcccggccgccccgtctgagaagtgaggagaccctctgcctggcaaccaccccgtctgagaagtgaggagcctctccgcccggcagccgccccgtcccggaggtgaggggcgcctctgcccggccgcccctactgggaagtgaggagcccctctgcccggccagccaccctgtccgggagggaggtgggggggtcagccccacgcccggccagccgccccgtctgggaggtgaggggcgcctctgcccggccgcccctgctgggaagtgaggagcccctctgcccggccaccaccctgtctgggaggtgtacccaacagctcattgagaacgggccaggatgacaatggcggttttgtggaatagaaaggggggaaaggtggggaaaagactgagaaatcggatggttgccgtgtctgtgtagaaagaagtagacatgggagacttttcattttgttctgtactaagaaaaattcttctgccttgggatcctgttgatctgtgaccttacccccaaccctgtgctctctgaaccatgtgctgtgtccactcaggggtcaatggattaagggcggtgcaagatgtgctttgttaaacagatgcttgaaggcagcatgctcgttaagagtcatcaccactccctaatctcaagtacccagggacacaaatactgtggaaggcagcagggtcctctgcctaggaaaaccagagaccttttttcacttgtttatctgctgaccttccctccactattgtcctatgaccctgccaaatccccctctgcgagaaacacccaagaatgatcaattaaaaaaaaataataaattaaaaaaaaaaaaagaaaatctaagttctaaccatagaagaagctgcagaagaaatgaagaaagggatgataatttagattttgatgttgatttagaagacacaggaggaggccaggtgtggtggcaagagccttgccggggtcttctgatgcttgtattgaaaaaactgcttttgctttgtaacaagcaaacataagtgttggtacttttgctctgagtcatttacgtgagatcatttatcaaacggcgctgaggaccagtttttgaggctagcaatataataatgtcatcttatttttatatgagctagttcttacataaccatcaattctgaatctggtttactttggtattaggtaatatacacagtttatattgttcatgtataaaatttgtttttctatagctttttctgatttcctcattaggatttcttttttttttttttttttttgctgctttttaactttttcaaaaatcagcacaatttttccctttgaaattaaatagattacttggtttccaacatttaattttgtctattatcagaaaaagttttcacgtaatgaaattaagcaatataatattaatggaaaacattattctcaggactaattactgcgcacctttgatgtgtacttgtttgcatttactatatgcatgacatactactactgtacaatgaatcgcagtgcagagtaatgatgattcaataaatgtagatctattttgcatatttgcacaacttaagaaataccaacatcattttctctgagaagccttccctgattttcagcctaggtacaattcctcagacatgtgttcacaaagctgcatacttttccttcacaatattatctaatgtcacatttcttcattaataattattaatgtcagtctacccactaaactagagtaccattgcttttctagtgttacaataaatgaataaatgaatcagtgaagtcatgtatcattaggatgtcgcagtatcttttatgaaatactcaaagtcaaaagttggtcagaatttcacattcttaaattggcttttaatatagtgatattaattcacttgatggtctcctcctgtgtctttttttttttttttgagacggagtcttgctctgtcacccaggctggagtgcagtggcacgatctcagctcactgcaagctccgcctcccaggttcacgccattctcctgcctcagcctcccaagtagctgggactataggcgcctgccaccacacccggctaattttttgtatttttggtagagacggggtttcactgtgttggccaggatggtcttgatctcttgacctcatgatccgcccacctcagcctcccaaagtgctgggattacaggcgtgagtcactgcgcccggcccatcatatcctttatgaataagaatttctagtcactaggtccaggagtctgtattttgaaattcctaggtgattttggtgaccatccaagtttgagacccactggccttaccgtcatgcctcaattttcaaatgaggaaactgaggactagggcgggaaagtgatttccttgcaattaaaggcagccagtggtaagacgagaccaaggacctttcggaggtcccttgcacccctgagagtcagtgactctctgttttcaccttggactgccgtgatgtctgactcatactgtagtcttcttcctaaaatcctcttctttttattttttatttttggcagtgtgttgaattctcctctagtttcattcagtgagtgctatttcttgcttcattataaaaggtggtgtgtcacaggtcctgtgtgatcacacaggctaagtgtaagctttgagaatgatctcttggaccctttttctcagatttcagtgttgtgcattattatctcatcgtggtggcttctttgtgatttagtttcccctcctcccttcaccataaaaaaagtcttatctcctgatgtatttttggctgcagaataactccagatggtacattttgtgtagggaaaaaaaataacagaatttttcacactcttctgtgaattattttttgactttcaattataatgaagttattaatcttacaaaggctcgctttgtaaagagactaatctgaataaacttgcttgtatacaataagtgccatggcaaaaattaagagtacagttattatcagagactaaaataacaatttaattttctagaaatagaaaattaagaaaaataacttttaatgctgggatttgacattaagaaatgaatgacaaaaatgggaccaaataaaatgctgtaattggccagacatggtagctcatgcctgtaatcccagcacttggggaggctgaggtggaaggatcacttgagctcaggagttcaagactagcctaggcaaaacctggtctgtatttaaaaaaaaaaaaaaaaaaaaaaaaccaggcatggtggtgtgtgcctacagtcccacctactcaggaggtagaggcaggaggatcacttgagcccaggaagttgaggctatagtgagccatgatcatgccactgtgctccaacctgggcaacagagtgagaccctgtctcaaaaaaaaaaaaaatagtaaatggtataactgaaagtaccttgaaaaaatatggcaatatgcagttgcaagttgctgatttttagaatcataattctaagccggatgtggtggctcacacctgtaatcccagcactttgggaggctgaagtgggtggatcacttaaggccaggagtttgagaccagcctggccaacatggtgaaaccccgtcttactaaaaatacaaaaattagccaggcgtggtggtgtgcatctgtaatctctgttcttggaaggctgaggcatgagaatcacttgaacctgggaggtggaggttgcagtgagctgagatcgtgccactgcactccagccaggctgacagagagagggcaccctgtctcaaaaaaaacccaaaaatcacaattctgatttgagagctgatgacagttgcagatgattaagagcttttacaaagagcgtgcatacatttagcaatctctaattgggaatgttttggaaaacactcctgagaatgtaggttatttatagaagatgtcctttactttgatataatcttcctaatgtggtttttatcagttggatttttctggatcaacgagaagacctatgagcctaaaatgtttgtaattctagctgtgtttctataagaacatgagagaacctcggcattaaccattcttgctggtctcacagaacaccccaaaaatctgtgcagttttgctggagtgatgacagagaatggaaaacaagtttatgaatttttttttttttttttgtgaggcggagttgcacttgtcacccaggctggagtgcaatctcagctcactgcaacctccgcctcccaggttcaagcgattctcttctttcagcctcctgagtagctgggattacagctgcgtgccaccatgccctgctaacttttgtatttttagtagagacagggtttcaccatgttggccaggctggtcttgaactcctgacctcaggtgatccgctcgcttcgacctcccaaagtgctaggagtacaggcaagagccacagtgcctggcctgtttatgaagattttataaacagatttctaaattcagaaagtatttaagggatcccctctggtggcactttaattcagatggggtccacaaaataggaaaatatttactaggaaatttgaacaatcttgaaatcactgaaaatggtgatgtgattctccagaaatttctgattgggaataagcactttgaagtaattggctatcttattaatctgctgttcctgaatttccccttagtagcggacatgctttattgtattaagttggataaccaccttagtagcaaagatgggcttgggcttcagtctggtcaataggcatcttattcaggtagatgccagatgggagggatggggacagcttagtgaagaaggatgaggctggaggtgactcttgaaaaatgattagtgttagttggaaagattaaggtgtgggagagtcccacgcaggggaacagcaggcagaaagccagggagagagaaaacagtgtgttttgaggacctcttctgctgtggctggaataaagagggctgtgttgaagagtgaagggagctgaggccaggcaaaaactcttgcatgccttgagaggaggttttacccaaaagacaagtgaggagggtggtgaaacattttagtcaagcttgtgtgttcttcaaagctcgtttgagctctggcatggaagaggatggatttcagttgggcaaaattcagagcagggaaaccagtcaggaagttgtggcaataatttggttaagaaactctaagggaccttactaaggtcaaggttagactttgtaaattttggggtccagaaaaactgttaataaacttaaccgacaggaagattcccctggcatcatagcctgtcactgtgaggatttaccttctttttcacatagtaatagattgtgaaaagtctccaaaaccatactcaaggattgaaggtcacattttctctttcgaccattctacacttaggtagaaaaaaatttcattaccaactagataataggatttgagctgttgtggttgacattcttgatgaaggactgatcagaaattcttggtcatcttatgtaagaataacttcttggagtaaatatgttcctgaagagctgccatttaaagtaaacttttgaatatcatatcttaaatgctttgtaatcataaacatttaaattctgtggttcaagtaatcatttttaagtaatttacttctaatttctctctcttttttttttggagacaaggctgtcacccaggctggagtgcagtggtgcaaacacacttcactgcagtctcaacctccttggctcaagcagtccttctgcctcagcctcttggtgtggctgggaccacagatgcatgctgccatacctagctaacttttcttttctttttattttttggtagagacgaggtctcgccgtgttgcccaggctggtcttgaacttctaggctcaggcagtcctccaccttgcctcccaaagtgctgggattacagtcatgagccactgcacccagtttgtttctctcttttttaaatccaaatttttctattaggctttgcaaataggcccttaaagaaataggcagcatggctggtaaacaaattttgttctttagatgtttccagagaaataatgtggtattttaagagcttttaacaagagacctcaagataattatttttaggatataccataatttaaaaaataacttctgaatatgagagtaatacattaaagaatattcctgtaatcctagagctaagccatgctataattctggtccagtttacggtttgcgctcacatatacactcacatttttataccctttgtttttatgggttgtattcatgctaaaaaattgttttgaaaacactttttatggctgtataaagtaggtgtaccctatttctaaagtaggtgtgccctattactggacatttagtttgtctgcagttgtttttttgtttttttttttttttgctactatagaaaagcacagtgatgagcatcactgcattcatatttttatctgaagttgccttttcccctagatccctgaaagtggatttgctgggtctgaggagttttacttaacacctttttcaaaggctgtgtcattcctgtgacctcactgcaggtggtggacctactgccctttgcaccaactgactgactgctgtggtagatgccttcgaacttaggcaagctagtaacattttatatggggtttggtttttactgaaaaggtttgcttctggaacatttatgtaagttacagcagtcttcatgctgaggacacatggacacgtctcttatgtctcaagcaaagatacccccagcctgatgtagaaatgtaattgactactgagtggatttcctttcatgtggaatagaatgagatttattggcttgtataaactagagcagaaaagttaatagaaataataaaagctatcagactctgtttagctctgttatgctattacactcagatcctttaaaaactgtgtttagaaaattgttgtgcagtttaatatgtctgcagaatattgaatacagtgtccatcagaaaatctaatccttttttaaagtttagatagaactaaataacatatcttttttttttttttttttttttgagacagggtctcactctattgcccagactgaagtgcagtggcacaatcagagctcactgcaacctccgcttcctgggttcaagggattctcccacctcagcctgctgcgtatctgggaccacaggcacacaccaccatgcctggctgatttttgcatgttttgtagagatggggtttcgccatgttgcccaggctggtctcaaactcctgggcttcagtaatcctcccacctcagcctcccaaagtgttggaattacaggcatgaaccaccgcacccggcctaaggagcatatcttgatgtttctagttttcttataatttccttctgtgttctgggttgctcttacatatatattctataaattgtgtgttttgtgttttcttttttggggggttgggggagacagtctaactcttgtcacgcagactggagtgcagtggcgtgatctcagctcactgcaacctccccctcccagattcaagtgattcttgtgcctcagcagagtaactgggactacaggtgtgtatcaccacgcctggctaatttttgtatttttagtagagacaaggttttgacatgttggcccggctagtcttgaactccttgcctcaagttatccacctgccttggcctcccaaagtgttgggattacaggcatgagccaccacacctggccttatttttatgtgttctgaatttaggttaaaattgaagaagagggtccaagactaagtgccaacatagatatttgcaggtgaaattgcttttctttgtgtagcccatgttgtattacttaatagcctcttaaactggagacccctgataccttacattcaaatgtgagtgatgatagggtgtctatcaaagacaacagaagttaatataacttccccaaagtcacgtgagtgggttactctctttacttggaacacatgcaaagaaagggtcctccttcaacacttgaagataatcacagtgtcatgctctttctcataaatgccactgtagagagtacagagaaaaatgcaattaatggtgctacccaaatcctgaaaagaatgaggtacggtgtaggaattggacagcagacagagtgcaagtttttacataattgtaattaatacagacatgacttacttgagaaatttaaaatgtgaatattttaaaaattacagaggatgattattcacattataaagtgactcatcatcccttttaaaaaggacttatcttttaagaggatattcctctggtgcatttgagtccttgtctgctcattgttttaaacaacttgcagtttttttaacaaattacagtatgacctgtgatattacccagacattcaattccgaggtatttaactagagatacctaggaatgaaatgaaaacacatattcgtacaaaaaaaatacacaaatgtttatagcagctttatttgtagtaaccccaaactggaaacaacctacatgtccatcatgggtgaatggataaacaaactgttgtagccatttaatggtatactattcagcagtaaaaacaaactattggtatatgtagcaacatcagtgaatctgagaataattatactgggtaagcagccagacaaaaaaagagttctaactgtatgattccatttatatagaaattacaaactaatctctagcgacagaaagcagatccatggtcgtctggaggtggagaataagggtaagtgaggatgggccaggaggcatggactccaaagaggcatgggaaacttaggagtgatgggtatgctcattttgttgatggcaatgatggtttcacaggtatatacataggtcaaaacttgccaaattgtgtaatatgcacattgtatatcagttatacctgaataaagctgtttttttttaaaaaaaaaaaaatgtcctgaaaaaagttctgtcttcccttgtctgccaattgcaccgttctttatatctcatccagcctgctcacagtcaagaacaggggcagaagtgggctgacaggtgtagtgcagtgtgtggaatgctgtgacaggtgtgggcacagaaggtacaatgaagaccccctggaggaggtgagcttgaggcgagtgtagagagggcatctcagaggcaattctgagaatcataggaggttgcaggtgtgtggcagaggttggtctggaggacagcagggaccatacatttggagcattgttttgaaagcgttgtacatcactgacgggtggtaagcaggggacagacaaaatcaactcggctttgcccactctgggaagatgaagaggcaggaatcccaggttcagagctcaaggaacccttatgtgatgccaccccctcaaatctgtttaaatcatattaggagaaccttgttgtccaagagggctctgtcttgctagacagttctgcgttgtccaggaaactgcagactacattggaatcctacctgtacaaatacttaagatgtttcatttcaaaaataaagtgttctctgtagaaattaaggaaaatacacttaagaaaaataagaaaatttaaattgcctttaatcccaccacccagtgctaaatacttttaacattttggtgtatattgtttcagatatatgtatgttttaaaacaaaattagaatcataatttgcatgtgtttttacctttatttcctctgagcattattccatgttttatgtagacataaaatatcattgtttttatttgatgcatgagagtctacatattatatgtatggtgatttatttaaccaataacctcttttggggatttttttggttgtataattttgtttaaaaattctgggaaaaccataattactttattaaaaagcaagtaaatcaaagaatatagttaatttttttattaacaggtgcagtttcttaattcatattaaagaaaaatagccttggtctagtagacattttaactaaatgaagggaggatggtccccttctagaagtacacatgggcttatacagtagttctttgttacccagtgataattatttcatctgtgctattcccaaaaagtaaccatctatgggaactctgttgttcccaaaggaagatttactccccatatcagaaatatgttaaaaaaaagtataaataggccaggcacgatgactcacacctgtaatcctagaactttgggaggctgaggcagggtggattgcctaagctcaggagttcgagaccagcctgggcaacacagtgaaaccccgtctctactaaaatacaaaaaattagccaggcatgttggcgggcgcctgtaatcccagctactcgggaggctgaggctggagaattgctagaacccaggaggcggaggttgcagtgagccgagattgcgccactgcactccagcctgggcgacagagtgatactccgtgtcttaaaaaaaaaaaaaaaaaaaagtatgaataacagtaacagctaacattttttttggaatacttttatcttctacatattattagaagcatttcacatgtattaacttatttagtcatcaaaacagttctagatgtaagttcagttatttttctgtttaacagatacgtagacagaagcacagaatgttagtaacttacccaaataaatgatcaacttatatgaaaacatatccatcatcactagtaagcagacttgcaaatgataataacaagctatcactttggagacctgcagtgatcttagaaacttaatacttgacgctgattaaggtagaaggaaacaggccctctgtacaaggttgatgggagggtccatttctgtagagcagttggtttccttctagaaaatttatcctatgaagataattggacaaggttataatgatattactgtgctcatggaagtattgagaatagtgaacaactatgtgtcctgtaatagggacttggttaaataaattttggtacatccatattgtagaacaccatacagctattacatatgatgatatgcgcatatgtttatggaagtcgttgctcaggaaattgtaaatggagataaacagacagcatggaacatgaagatacgaaatctgcttctggctgttggtctggggcccccaccaggaaaccagcacacctggcttccttcttttttaccgtaagaccagagaaaccctagagttgcagtgaggaactgtcttgggttctctgaaaatgagcatcatgaaaaatgcctggcttaaaagaagagaaggaattaatacattttgttacaggtattatattggcttcatttaacaaatgcaggaacaattttataactggaacatttagccactgcaaaaaccatgaattagttttttggtttttttcaagttttccactaagctcacttgagtactttcttccttcttcctttgagactcactctaaccaccagggagtcacctctttattgatctgcctcttgatgccaggaatttcctttcttctaccatactttacctatgtttggtgaaacatttgaattcacatgttactgaacagtgacttggtgtgttaaccttcttaggtttttaaactttgaacaactgcctttcctcaaaggcaaaactaacttttttgggaattgcagaaatcgtaactccccagggacagctcaccctcagtcctccaagccatagaatttaaagactgccttgatgccaccaaaaacctcagtaccttttgttacagaaagaacattgtgtggtatacttcctatgttttgaaaaatatctgcaaatattttgggaactgaattttgggaagggctaccctctggctgaactctgcttacaaaatccataaaaacagggttccagctctgcacagcaggacaggtgcaagtgtgcgccagtaacctcacagccggagaccatctctacaaacatcctgccaggagaagagtagagaataacaaaggaaaaaaacaagccctccagttggcattcttgttgaggaagtccatcaagaatcaagttcctgtcaacttgtttctgtattcttttgcttaaagaatcacagtagagagtcccaatctgaaaaaaactttgttatatttcttaggttggggatacatacagcatggagttggaacttcagtctgtggagccaaacccagactgaaaggcagcaagagagtagcagctaagagcatagactaagtgcttccactgggtggagcatgaccagtgcattcacaagacgggaatgttcggtagacttgctgccggccatgtgtgtggcttctgagcacatgtggctggtgtgaattttaaattttatttaatttaaattaaatttaaatagctacacatggcttgtgatgactgtgttagacagcacaggatagacttagaagctagactacttgggttcaaattccagcttcactatcgtttacctctgtgaccttggacaacattccctgagcgctttatgccacagttttctcatttgtaaagtgataaaaagataatagtgcctacctcaaaaaaggttattttgaggattaaatgagttaatatttgtaaagggcttagacctgggcacatagtaaaagctatatcagtgtttcctaaataacgcaactatatatacatccctaaagtgaaaaattgaacctagatccatactatattttttttcaagaagctcccatgcatccattgtcaatgcatttttcttaaacaccccttaaatattggggaaagcagaaaagtcatttatttgataaatatgtctggagcccgtactttatgccaaatgctgtgttgggtgctggagatacatgtgttggtgcatagagacttgattcatcctaataaaagggtaacggtcccgcagtgttttcacctagtggttaaggaactttataatacgaagggactttaaaagtagggtaaaggtgtagatgtagacggagaaacccaggagactttgcatttgctcctagtcagctggctgggacttcacccttcacctcctgttggctcatgcttttccctttgcacctgtggagcacaggtgtgtcctgaggccctcaccagccatgcagaagccttcaggtagggttaacatttgcccacttctggaagggatcgatctgttctcagatgacagtgataattcttggcctattttgactcaatagtggcaatattagtagtttttttgtatttgttttaatttttttctccttatttaaggaaaagttggaaactaatgttgcttcctccattttttttgtttgtttaaactttgctggttcatgagattgaaaagtctgtgcttagaccataccacccgatgcagtttgtgtaagccttaaaaaataaatatttcagccccaacattcatgtagtactaaaagtgagaggcttttgaaccataactgatttgacaagaaatggacataatggaggaaggtgactggttgtttgcgtgttgatttgctttcagcacttgctaaaacgtggagccaaggggagagaatccaccaggttgctttacatgtgaaaaatattaaaatgtcagcacagcccagccactgacataagaaaaaccgtttcacagttaagtctctaaataatgtcctaaaaacacaacatttgtaattatctaattaataaaggatacaggtaatagaagtaatatggaaggcattttctggtagataaagcttcagaaaccttcacatctgcacatgattatgaagcccctgttattactttgctttcccccttcctttagcccatgtttctcactatgaactaatagtacataataataaaaccctggatgtcagccaacacagagttttggctaacttttccagtgtttgttaaagttgaaaaagcattgcagctgttatgctgggtactttccaatggaggatgtgttttccagatgaaggcgcaaatggtaattgaaatgtaatcagtatttttggcatcttggaattataattctttttacgtttgtaatgttaattgttcatttcttaggatttgttttgtgtttttctgtgatctgtaatctactaaaagtgagagaatgaacaaatgttttaggcggtttttcattctttgaaagaaaaatggcaagtagtcacgtttgttaggtgatggcttattttaaataatcacaaaatttatgtttgagacattttattgtaagactcatgtttcaggcaacagaaaacagaaaatctaaatctcaaatacaacaaaattttagagatgaatggaaacttctagatcacttggataggctgaagactcagtgggcctcaggtgttcccaggaccaggctgctggagatgtccctttctttgagagatttgttctgtttttttttcatctcgatccactgtgttaaggaggggtggggtgtgtctgctgatggttttattggtatttgaggtttctaaagttttttgtttaagctagaaagagctctagctgattagtagctctcaatccttggctggatattttattttttgttttgttttgttttgagacagggtctggctctgttgcccaggctggagtgcagtggcgcaatcatggctcactgtaacctctgcctcccaggctcaagggatccacccacctcagcctcctgtagtagctgggactacagatgcatgccaccacgcctagctaatttttgtatagatgggattttgccatgttgcccaaggtggtctcaaactcctagcctcaagggatctgcctgccttggcttcccaaagtgttgggattataggtgtgagtcactgtgcctggctggctgcgcattttaaagatcttgatgctcactcatacctgagccagcataattaaatcacagtatctccacaggtgacagtgatgtgcagccaagaacagtgttcctttccagtcctctctttatagacgaggaaattgaggccctgagcagctagatgacttgtccaaagtcctctgctgggactgacccaaataaggaatggctgatttctggaagggatgtcagattctctgattacagatctctcgtgatcttctctcggggctcgtggactgtcctgtcaacagtcaggctaggcagctgcagagagcaggactctggggtccccagtgaggaggaagcaaagagtcctcatcttcctgtcccctttacccgagtagaaattgcccttccttatcccacatgagctaccagaggcatgataaactgcctctggggctttttggctctttggctctttttttttcttttttattcctttagaaagaaataggtttgtaattagctaactaagactgacaaataccagaccagttgctatatattacaaaggagcttcttgaatagctggtcacttctgcatattgtagaaaccttccttctcccttttagggaacactacacattatttaggtacagtgttagggataactgatcatttctaatgctgtgtatatccattaagggtaatttaaagcaattaaatgctaacctggctggacagccaggtgtaggtttgtggcatccagaaagaggagatggacttggtggattctgaattggtcagttccacctcttcgtgttttggaggctttgtctcgttacttgctcacctttctgctcagtgctccttgacatggcgggtcaggttgatgggaggtggtacctggatgccctttgctggcactgggcactgcaccggagagttaccacccctgcctggggatggagcctctctggggagaggacagtgcaaaggtgggggactggggagttgtgagaagtgggagctagaatatggagcaactagtgtgtatagagacttcgtgagaaaagctcgatcacgttttggtaagtatttgcagctccctgaaaatttgtgttgggaggtgatcattagcatcttctggaatatttgcgctaaagcaagactagattaaggagctttggttcatttccagacctgtcctgacagcatcactctccaaatgctaaactctgagagagagagtatgtgtatttttcttttcaggatgtcagtcaaataattcactcattcctttccccaaacacactggcctttgaaatgacaccctacccctgccaatagtgagactgtggttctgatcggggagctggcgagtttctgctttctagccccaaaggcctcacccttgctctcatctggaagctgatgggaaggtttgttagtcttctcaggagcctgtcacaggacctcaggaacgtagcctgtagtgggcagctggcatcaatttagtgctgtggggatggcaggctgtcagagtggttgcactttacctgcacgccccccaacccagccctctgtgaagggttggtttacatcagggatggctgctcctgacataattgtctatttccggcaacagaggaagataccttctgccatttagagaagagaaataaatattcacttcagagaatacactttgaagtggggctgtgtgtgcatgggtgacagctccctgcctacttttcctgcaaggttcttgtacatcaggaaaggttaatggacttcccttgaagtcagacagagatgtgttcatggaaaatccaagtgcaaaaccaagggcaaactctggctttcctgggggtttttttgttgttgtttctccttttagaatggacagtgaaagcaaggtgaagggcttcattattcctcttttgtaaagcctgttgagcaggaaccttctggagcttctagatggaggttcctggagattgtgtgagtggtgagcagtctggttgaagagggccagtgtttgttggctttgccctcattgtgtcaggaatgagctctgcacggactcagagagctaacagatcagctagggtacctcagagaagaatgcactcgaggctactgccatgttccctctgtggtcatgaggaaaggagaactacctgtgtggcttgggggcttccctgacatagtaatcacattggattttacaactgggtacattcttagccttcagtttggtgatccctgtgtttaaaaagaaaatccttttgttgtgtggaggttaatctgctgagcttatttttggtcatccattctcacctgccccacgacactggtcactggtgtctccatgctgatatattatgctcagcttttttgcatgctccgcatggagatatgaacacaattctcatgggaacttggcccatctttcagcacactatgtcagccagttgctgccttcctgttcatggaggactaggcgtagtgtgggggtctcattgctcatctggttagtggctttgcagtcagagcaagctgagggaacagtgccccctacctgtctgttctcctgcaggcccagtgtgggaacaagatgctcttcagagaaatctctttgacactggctgtctcacccagcacctacactcttgaaaatctgagggccttagcagaatttgaaagtgtccaagggttagaaatgagaagtctccatgagcatgaaagcgaccatccttgtaggtcattattttgatccatgctctcatcactggtttcacaaacaggcctttcctttctagtctttgaacataccaactcttttcgagtaacacagcaatattaaaaacatatacccattgccaaaaagcaaaaccaacccacttctggctgagaaactgctgaatacataactattcatccctcagtagctgagtgtggttacaatgaatggctttcccatattttcttgatgcttctaaatgtatgggttcacttttggggggaatattttggtgctgtcataatctatatatggaagatgttaaggatatttccaggaactgcattaaaacagccataacaaaccatattctgcagccttcaggtgtagtattttgattgcttggtttggtttatcaccaactactcttctgagtatcccccacactatattaggaatttgttacaatatgactaatgctgaatatgtgtgcattgatttttaagtgcactgggtgggactgacttgttcaaatctccgttaaagcaaatgtctgattaggagaaaagtaagggagtaatttgttaggaaaactactttctgaggtgcccccacctcccctccttccaacctgaagaggcagagaggtttgtgtaaacaaaggtcctgcaaggcacagctgttttacattctgatgttctatgactttcttaaataaaaaccttttggattttcatatctatttagctagtaggaatatttcctcctttttcggagaataaaatcctagacttaaggatattccttgggtgactgagaagtcataccagcctaagcagtacagctggccccctgtatccatggcttctgcatctgtgaattcaaccaaccatggatagaaaatatttgggaaaaaaaatccacaaagttcgaaaaagcagaagcacgatttgctgcttactgagaactgcattgaatccatgtgagtaaggtgatgtgtaggcgttgtattaggaattataagtaatctttaggtgatttaaagtatttgagaggatgtgtgtcggttttatacaaatactacaccattttatataagggacctgagcgtccatggattttggtattcataagaggtcctggaaccaattgcccatgggtagtgagggatgactgtattttctaattaaaaggttttttttttaataagcaaatgttttacttagtaccttataatattttaaaaagcgtaaaattcccaaataaagtaattggtttagtgataaatatttccagtggcgtacttaaaatgaatgttttcatcagaatgcagaagctgttttgagaactttttgctcattattttcagtggggttgtgaaatccaatgaaaacgtgtataaatgtttgtagaagaatactttgtttatagagtgcaaatattttcttgatatgacaacaccccaaacaaagaatggttacaattaaagtaatggtgattcagttaaacatagagctggaaaagccattattttgaaatatcttctgagcctcattgaagagagagtgtcttacacaccttgggaaccaagttttgcatattatagtattaccacattgtattcgatcacaagaatggtgtgaatacttggtggttaaacaaattattgatgcttgttagttggatgagatcttggaatgcatgcatcccggcttcccacacagtactcagttctttctgtagctatcctgttgaatatatggagagtacagtatactttcaggcaagatggtcatttaacaggtcattatttaaacattgtttcagtgtgtgctgtgaaaacaacaacaataacaacaacaaatcgaatacctctctgctctctgcatttttggagcgctctagctgttagaaagtacctcctaacccctagccactgtgaagttgttgctccctgcctgctgggaaatctgtgccagctctcccaggaaggctcctgaagctgcctgcacatacctgccaggtgtgtctcctggacttttccccaggggtcctagctcctgggctgggtctcctaggtgtcttacagcctggctgccccttctggacactcttggcttggtcagtacctggggtgatttaacttggcgtctaacagtgaagcttcctttagttgtatcttctgctgttgcttcacattgagcttgccacgttttccttgaattgctgtcagtttttctctcttccaaccttgggaactttatttttaaaaatctgggccaggcgcggtggctcacgcctgtaatcccagcactttgggaggctgaggcgggcggatctcgaggtcaggagatcgagaccatcctggctaacacggtgaaaccccatctctactaaaaaaacaaaaaattagctgggcgaggtgacgggtgcctgtagtcccagctacttgggaggttgaggcaggagaatggcgtcaacccgggaggtggagcttgcagtgagccaagatcgcgccactgcactccagcctgggcaacagagtgagactccgtctctaaataaataaataaataaataaataaataaataaataaaatctgaatgcaagactgtatgtgtgcttgaataatttgaatcctctcttggccctgggaccttccccgtgctacatgtgctttcggaggttgtgaggaaagggctgaccaggccatggacctgtcccagagccggcacccttgagcatggctgctcagacagcagtgaaaatttgtcttagaaatttgaagttgcttttgaagctttttggtcagtgagagaacttaaaaattctcatgtaaatataatttaaaaaatatagatgactcaatctacaagagcttatctgtttggtttttttttttctacttatagtttacatttgaaaaaatttaccacttgatgaactgagtaattttttcttcttgatagtagaggaattggtagggaaagtgcttctaatactcttcgaagctgagaaaattttaagtataaagtttgttcattaaacatttgtgtattgttgtctgggagctagacactatatttagggatacattgatgaaaaagagagaaatacccaatagttcttggagagtacagtatactttcaggcaagatagtcatttaataaatacacaggtaattatttaaacaccatcgtagtgcgtgctatgaaaaaacaacaaaccagtaggaacatagaacaggagaggccctgggctgggactaggggtttcagaagagtctctccagagaaagtaaagtttaggttgatctggttctctctcttttttttttttttgagcaacaagactgtttatttcacctgggtgcaggcaggctgagtccaaaaaaggagtcagcaaagggtggtgggattatcattagttcttacaggttttggaataggcggtggagttaagagcaatgttttgggggcagggggtggatctcacaaagtacattctcaagggtggggagattatatagaaccttcttaagggtggtggagattacaaagtacattgatcggttagggtggggcaggaacaaatcacaatggtggaatgttatcagttaaggctattttcacttcttttgtgtatcttcagttgcttcaggccatctggatgtatacgtgcaggtcactggggatatgatggcttagcttgggctcagaggcctgacattcctgtcttcttatattaataagaaaaataaaatagtggtaaagtgttggggtggggaaaattttggggggtggtatggagagataatgggcaatgtttctcagggctgctttgagcaggactggggcaacatggaaacctagtgtgggagagatgaagctgaaggaagattttgtggtaaggggtgataattgtcgggttgttagaagaaacatttgtcgtatagaatgattggtgatggcctggatatggttttggatgaattgagaaactaaatggaagacacaaggtctgaataagagaaggagaaaaacaggtataaaaggactaagaattgggaggacccaggacatctaattagagtgtccaaggggggttagtgtaattacttgcttggttggcaagcttttaggctctatctttgagttttttttaatgttgtcatataccaggccagattgatttaggtaaaaatagcactcttcatttaaaaatatagagtccccttttttttttttttagcagtaagtcgagacctttgtgattttggaagaaagagaaatgcaaagccagcaattgtttgttaaagaaggattagaaacggctaggagagagtaactgagattgatagtgtgatagagatagctggggagaggtagagggtggcataagaacgggaatgagaataagagtaagtataaaagtaaagaataggacttcatcagggtgaaagtattggagggtaccttgccactgaagatcttctatccacttaaagagagacttaagggtggcagtttgaggaaaaaccaggtgccactgaataccaacagcctgagaaactgcttgggtgatttgactagtaaaggccggtccgttatcggactgtatagaggtgagaaggccaaaccgaggaactatgtctgacagaagggaataaatgaccacggtggccttcttagaccctgtgggaaaggcctctacccatccagtgaaagtgtctacccagaccaagaggtattttagtttcctgactcgaggcatgtgagtaaagtcaatttgccagtcctgggcggggcaaatccccgagcttgatgtgtggggaagggagggggcctgagaaattcttgaggagtagtagaatagcagatggaacactgaaaagtgatttccttgaggatagatttttgcgatggaaaggaaatgagaggttctaagaggtgggctagcgggttctaagaggcgggctagcggcttgcaacctacatggaagaggttatgaaatgacgaatagaatgggcctgtgagactggaaggagatttttctttggtccaagaaccatttgctttgtgtgggaagagatgggtggaagtttcagcgagggagtaggtgggagtggccagatgagaaggaggaaaactgccctgagggatagaagttggaacgctagctgcttttttagctatcttatcagcataggcgttgtccagagcaatgggatctgaagccttttgatggcctttgcagtgaatgactccggctttctttggaagtaaagcagccttgagaagagttcttattaaagaggcattattgatggaggactcttgcatagtgaggaaacttctttctgcctatataacagcatggtggtgcaggatatggaaggcatatttagagtcagtataaatattgatgggtagtccctttgcaagagtgagggctcaagttaaggcagtgagttcagcttgctgagaggtaatggaggggggcagagcggtagcctcagtgatagatgtggaagatactatagcatagcctgcctttgctggtgagtggcgattaggcctggtggaactgccatcaataaaccaagtgtgatcagggtgaggaacaggaaagaaggaaacatggagaaagggagtgaatgtcatgtggatcagagagatacagtcatgggagtcagatgtatccggaatagtgtgggaggctggattgaagtccgggccaggaacaatggtaactgtgggagactcaacaaagagtgagtacagctgaaggagccggggagcagaaagtatatgcatcaggtgtgaggaagaaaatagattttggaagttatgagaactatagagagtgagttgagcatagtttgtgattttgagggcctctaaaagtgttagggcagcggcagctgctgcacggggacatgatggccagcctaaaacagtaaggtcaagttgttgatctggttctcatttatccattgtccttatctttaaaatcacaagatattgagagttagcagtgccattgctaatgagattagaaagccttcattaattacaggatccttggattgagattggagtttaatggcacagaaggcagctttagggttcacttggtgaattaatctgctcaggctgccataacagaatgccacagactgtatggattaaacaacagaaatttattttctcactgttctgtagggtagaagtccaagatcaaggagctgtcagttgatttctgatgaggcttctcttcctggcttgcagatggctgccgcctcactgtgtcctcacctggccttttctttgtgcaaatgggtgggtgcaggggaaccatagtgtctctttgttccttgctttctttctttttttttttttttttaatgataaggggtctcactctgtcacccagggtagagcgcagtggcatggtttctgctcactgcaacctccgcctcccaggctcaagtgattctcccacctcagcctcccaagtagctgggattacaggcacccacctctgcgcccggctaatttttgtatttttatttgagacagggtttcaccatgttggccaggctggtctcaacctcctgacctcaggtgatctgcccaaagtgctgggattataggcgtgagccactgtgcccggccattctttgttccttttctaataactacaccagtcctattggattagggccctaccattatgaccgcacttaacctagattacctccctacaggctctgtctccgaatacaatcacattaggggttactcctacaacatgtgaatttggaaggtgagcacaatttggtccataacactcaggcaccactaaaaatccagctactgctggtgcccagcccctgatacttctctctgtgcagagtcatagaatactaacagaatttagttccctctaaatgttccaaattgccctgacatccggttcattcttctgtgctgctgattttgacaacagaagcaactgctttgaaagcattttgagataggaaaaacaaagtgcatattatgttgcagatattttgggaaatagaaaacttgtttattagtaacatatttcaaggagatgaagttatggacttgattttggtcaagtaagtagttgaaaaatgcagtttcaaaaatcacatcaccagggagattttaaagaaattcagagtggtctggatgccctgatcttttcttctaagttttttccccctactgggagaacgcagaaacttgctgattccttttgctcttatacctgattgaagacttcaccagctaagatcttattttcattttgcagtcatttgagcgatagtaggagccagataagtttgaattacaagcccatgcagctttggacaggctgtgcattatcctgtgactttctggaaagtgtggtgaggtatccccagcctgggtgttgggctgattggcttggttggattagggtctggccccacagtagacatacttaacatacttaacttatggctgtcacctatgataaatgcactgtaaatcagagatctcctttgtggttctaaacttatggcaatattttaggcaccatcgctcatttttcttgtatactcatgtttagatattctggaagccaaagtgaatccacatttactttaactgacttttgttaccaagcttgatattgagttcctttgaaaataagcttttaagcagtcatgtgcaggcctctaatggattccagactgtgtagactgtattgttaaacaatattttgtttttaaaaatttttttcttcggattgatcaggtttaaacaaattttagtaatagaatagtggtctccaacctttttggcaccagggactagtttcgtggaagacagtttttccactgacgggttgtggggatggtttcgggatgattgaagcacattacttttattgtgcactttattattattacattgtaatatataatgaaataattctggccggacatggtggctcacccttgtaatcccagcatttagggaggccaaagtgggcaaatcacctgaggtcaggagttcgagaccagcctgaccaacatggtgaaacccagtctctactaaaaatacaaaaattagccaggtgtggtggtggcgcatgtctgcaatcccagctagggattgcagaggctgaggcaggagaacctcttgaacccaagaggtggaggttgcagtgagccaagatcatgccactgcactccagcctgggtgacagagctagactccatctcaaaaaataataataataataattctacaactcaccatgatatagaatcagtgggagccctgatcttgttttcctccaattagatggtccatcggcaggggtgatagaagacagtgacagatcgtctggcgttagattctcataaggagcgcacaatcctgatccctgtcatgtgcagttcacagtagggtttgcgctcctatgaggctgtaatgccaccatgaatctgacaggaggcagagctcagatggtaggtataagcaaactatggggaacagctgtacttcgcttgcttgtccgctgctcaccttctgctgtgtggcctcggggttggggacccctctaatagaggtttgatcatgttaaaatgataattatttgaatgttttttctaggattgatattctcttcctttcaagtatcataggccaatctttactcattttgtttatttgaaaggttatggatttctaagtaagtctgggaaacatttaccaagcatacaaaggggaaaggcttgttgctgcagtgttaatgcaagcgatggtagttatttgaacagctctttgagaaaatttaataaagtgtaaatctctggaaatctgggttgccatgacagtgtaggacctatttaggatattttacaaagagaaatgatcttaaaatcgtctacatttaaaataaatatgttaaaaggcaaatgctggtgagattgtgaaattagtgattactgcaatcctatccaaatatgacccctcatgttttgcgacagttgaaaataaatttataattttataacttacaaatttataaccttctctgaataaatctgagtaaagagaaggttgttcctgtgtaacaatgagaattttactgggatccaaagtacatactatttaggtaggaagaagcactatgttttagagttagattactctgctgcaatacagctcctaccatctgtgttgcatttcacaattgtttttgagcacctgctatggcttaggtgccatgctggttactaatggtttaaagatgaacagaataggctgggcacggtggcttaggcatgtaatcccagactttgggaggctgaggcgggcagatcacttgagcccaggagaccagcctaggcagcatggcgaaaccctggctctacagaagatacaaaaattagccaggcatggtggtgtgtgccagtggttccagctaccagggaggctgaggccctggaggcagaggttgcagtgagccaacactgcaccactgcactccagcctgggcaacggagtgaatccctgtctcaaaacaagcaagcaaacaaaaaagaaaccacactagaacagaacaaagaggatgctggcccttgcagagcttgtggtggtggggggaggtatatgtgtctcacatatcacttagtatagtgttggttttcagtgtagttttacatatttgtttcatttcattcccttccaggtaattgagatatgcatttccacttgatagatttgcagaggattttggcattgggttgctctaggagaagtcagattacaaataaaaagtgctttattgctcctgtgttgttcaggcacatatgatactaacttatgaaatttcacaacaaatagggcagtgaaatgccaaactcactgaaattcaggactggtattttggcagcagcaccattagaactatactctaatgtaatttaaaactatttggaagtaaatgtaagaccaaattgttatttgtggtggctagaaaccccacattagccataagaccatggtgctaggtctgtattgagttaatagtttctatttttaaaaataatttagtcaaccagaagacatcagttaatttcagttttttaatagctcttctctgtatgtggaacagaaacaaggatggccttgaactgccatgtatatgagaatagctgtgtatttatttggtaggacttaaaaaatattttagttggttcaagttaggtgatttcaagatttgtaactgaacattggaaaaattaacttttctctctagatctatctactttcaatattcagctgatttttcaaaatattaggacttacaaaattatatttagattttagagagtattatatgtaagcggagaagaagtactttaaaattttaatgtacgagtagtaaagaaggataaatttctatgcagcagataaagaattttcttctcagggactcaaataataaatccatttgtaatatcactgttccttgtgcagtttgctctgtaaaatggaggaaggtgagaggggtgccatgtttctgtctcataccgttttttgttatagagtgtattcatggttatactgtataataatgataataagttcttaaaccgtggtgatgagatctatttggcagaatgttttaaaataaacagtgtatttcccacgagtgaaatcttaaaaaacaattaatttccattatagtaagggtgaattttgctccttcaaagagtatagagcctggttgaatttgcccattaagaaaaaaaaatgtgtctattggactgtgttgtttgtaaagctagaatcaccttccagtggcgttttccatccttacaggaaagaggtttatctctgaatattgagaatggaggttcataatgggcattttagcgtttgaatgttgtaggaagaagatggctaaatcttcactgctcccctaaagtacacacgttagttctggtggggagtagccactctgagattttatatcagagacataatgaatgggacccatgatatgtgaaattctaattctttagtacagagaaatgtgctcttcatctttctgtcttctgaggcttttttcaagtgttcgaaactgccgttgcaaaactctaactgagacagtggaagagatctgtactaaccaactccatcttgcttctaacctccaagcagtccttgctctttcctgggcttaggccaaactaactttgagagggacttagtttgtagtttaaaacaaagatgataacaaaacccccttcttgcctggggactagattgcttttgtaggactagcaaattaaccacaacattagaaaatatggtttaggagtcatgctgctggaggctgcaagattctaaacctccccaaatggttcctgggaataacatcactattgcaaaacctaagatgagtgcttgtgacattttgcagaccctgtcctcgatggatcatttggcaccacccagatggataaactggcttatctggtcttgtggcccccacccaggactgactcaatgcaagaggacagcttcaactctgtattcatctccacccctaccaatcagaactgccaactcagtggacccctacccagcaaattatccttaaaaactccagtccccaaattcttggggagactgttttaagtaatagcaaaactctggtctgctgcacagccagctctgtgtgaataactttattgcaattcccctgtcttgataaataggctctgtctagacagtgggtgaggtgaaactgttgggtggttacatcttcattaaaggagatgagcatttttttctttagcttggatagtgtttttcatcatttttttcattattcccatcccttatcaggaattttttagattatttatttatttatttatttttgtgacagggtcttgctctgtcccccaggctgtagtgctttggcatgatcacagcttactgcagccttggcctcccaggctcaagtgatcctcccatttgaagatgaatggctgggactacaggcatgtgtcaccacacttgactaatttttaatttttttgtagagacgggctcactttgttgcccaggctggtctcgaactcatggcctcaaatgatcctcctgcctgggcctcccaaagcactgggattacagatgtgagccccctcgcccagtgtgaccctttttttcctcctaattgcccacccatgaaattttcatgccatagatacattatatatctatgctaatatgaaaaagaatacaattttttgcctcatccccaaaatgaattttcattccttgtgggggcaatatcacccccattgtgtatgtacaaggagacctggctgggtgggtaactggcctaggcgtaattagactttgatgcaggtcattcatttccttatttatttaagagccttgagtctttttgatatttttctgacatagaccactattaaagggttcttgccttagagggtaggccaatttgttcatttaaagcatgggctttggagtcatacccacttggttcaagtcctcttggtttcttcatttttttcctgtgccaccaccagcaaaactttagtttattcacctgtaaaatagggctaataatagtatctacttcaaaaggttgctgaggaggatggaatgagaaagcaaataaagcaccgcaccccagaaagagtaagccatcctcccaaaatgtaatttttagctgtgttagggtttagagtcatcacctctgcattttaaagattaggttgtgttcttatggtacaagattcaatagtgatgaagatattatgataaaagcatcatagctgtgtgacttgattgagttgtttaactcttggggccccagtttccatatttttgttaattatgattgaaaatacaaaataaattgactgaaacgtcaaatatggtagtaatcccaataaatgcaaatggattatgcttgccgactaagtgacagaggctcttgggttagattgaaacaaagagaggcatacctaagacaaagtgactctagaagtgtgaactcaaaatgtctgagacaagtctcagtcaatttagaaagtttattttgtcaaggttagggacacaccagtgacatagcctcaggaggtcctgataacatgtgcccaaggtggtcagggtacagcttgcttttatacattttagggagacacagtacatcaatcagtacatgtaagatttacattggtttgacctggaagggcaggataggggcagccttccaggtcataggtagatttaaattttttctgatggcaattggtcgaaagagtcattatcagtagaaaggaatgtctggcttatggtaaggggttgtggagacctaggttttatcatgcagatgaggcctccaagtagcaggcttcagagagaatagagtttgagtatttcttatcccacttaaggtctgagttgatgttaatgctggagggggatggatagtgaggcatgtccatcctccccttttccatcatggcctgaaagagattttcaggcaactccgggatgcccttggccaagagggcccattcagatggttgggggccttagaattttatttttagtttacagaaggtttgaaataaggggatagaaaaatacataccaggcaaatattactgtcaatcaaaatagagttcatatgttaatagagatacaacaatatttcataatattaacagctcatctggaagataaaataattatgatcttgtaacatactcagggaatgagaaagaaaatctgataatcatagtgggaaatattactatactctgtcattgataaataaaagttagtacagctatagattatttgaagtccaaaatactttattaacaagagtttagtaatttaataattattaataggtctcagagaacctttccctgtcaggatgatctgattttgtgaattttggctgaactgtatacagctctatggtgccttttttttttttttcttttgagacagagtctcgctctgccacccaggctggagtgtagtagcgctatctcagctcactgcaacctccatcacccgggttcaagcaattctgctgtctcagcctcctgagtagctgggattataggcgcccgccacctcgcccagctaatttttgtatttttagtagagacagggtttcaccatgttagccaggctggtctcgagctcctgacctcatgatccgcccgcctcagcctcccaaagtgctgggattacaggcatgagccactgtgcctggtattgtttttttttttttttaaacagtggatatgtttctgtaaagctgcagtacactggattgttttaaaagtgaaggctactttaataatagacattatatgcttgtgacttttcttgtgttgttaattatcatgccgtgacttttcatgtgtgtctttatatttatgagcagagaactctgaatgtttgggatgcaatctcggtccttttttggcactagccccatgtacctgagtaataataggtcagacaggttattaagaaacagtggtttcttgcatgttctcactcataggtgggaattgaacagtgagaacacttggacacagggcggggaacatcacacaccggggcctgtcatggggtggggagatgggggagggatagcattaggagaaatgcctaaagtaaatgacgaggtaatgggtgcagcaaaccaacacggcacacgtatacatatgtaacaaacctgcacattgtgcacatgtccactagaacctaaagtataattaaaaaaaaaaaaaaagaaacagtggtttcttgtagatactcctttttggcaactgaacagttgagatagttgaagcaaaattctcagacacacgatttgcagtttggtgccttcagagtccttagaaggcctttttaaagatagcataccagcatccagtgtacactttttcaagtcttttatgaataaagtgggagtgttttaagtgtttgcagaacatttgggtctctgaattctgccaaagtaattgttacatagttttcttcctcgaaaaggactggcaaacattggtcaccttcttcattttatttaatttatttgagccttttaagattgggtattaaggaagtgtgtgtatatgggtgtgtgcatatgtgtagtgccaatgaaaattccatgtattctctatttgttgctttactctctgaaatctgagtagttcagacaaaaaataatttttttacaagggtaaaaactaaatttaaaagggaaatctaaattttattatgtgtatggagaggcaccttataaaatattcactctttcattagcagcctattttaaaaaatgtgacttccttgaaagcagagtgtctaccagatctatctaaatcagaggagtatatgtttcaggcgttgtgactgatggagatagtaccagagtggcagctccaattgactttgcccctgtgctctcacctcccagtcctccctctgccacctgtccaggcagcccatttagaaacaaataattagcaagcacttaatgttaccaggcaccctgctaggagttataaagacagaatgatgggatcatgacctcaagaggccatggcttattgatggtaagtaaatagaaggtttgtaattatgaagcagtcttttaatgataggtcagcggtgcataaggtgtcggagggagtgcatgtgggcactgtctaaggttgtctaattcagaccaggtggtggtggtggtgagtgatttgaggaggttcctggatgtagtgatacctgagctaggatttgcaggaagagcaaagagctgttccaggtgataggtttggaactgagacaagaacatgattcttctctctcaggagttgcaagagcttaggacatggatagtgggaccaggctagagagatgggcaaggtcctcgtgaagaatctcattttctctcctaaggcttcttggcattattctgatggcattgggagccatttggtagattttagtttttagggggataaaataactggaattacattttagcacggtccctctggtagcattgtaggggaatggattagggattacaatgagagatgaggagctggaatgagaaactcctgctggaactaactcatgagattttcaggaggtacgagttaccttagggccaccctgtggagcgagagggagaaatgaaaggtgactgcgaaggtttgtgtctggggcggctaggagaagtggggatgccattcagcgagggagtggtggaggagatgcagggcgtagaggtcggggctgtgagttcggtgttcgacaggcggagttagtgattgttaggagacacctgcaccttgcagggagcagctgtcagcaccgggtaaccagcaaagacagagaagtggatgatgtcaccaaggaagattttgtagagtaacagtagaggatgctggaaagtagcctggggattattgtttcttcataaaacaaaaacctgcaagtttatctgataacctgtgcgacttagataataaatgtggtatcttgggaagtaagagaacaggtaaagtattttccctctgggctgttccaggtattgactttacgaactttaatcaatatagaggagaactaacagaatacttacaaagcctggcatggtaacattccagtttctttcctaatggttatgacctgtggtagctcatgccagagctgtagaagcctctttacctcaaaggtacaggatgataatttccacatccatttctgccttgatccacctgtttgaagaaatgaatttagtgtctgcttattgaagcagaaaataataaagcatctggaatttctgtgcatcttatggaaaattccagttcataggatgtaggattagagaagagtaatttgagggggaggatcttggcttttctacatattcctttttatacatacacacacccacaccctaccccatgccaccccaccccccaccccacaatagagaagagcagggaaagtagataggcactttcctatctttttgaaacctagtcacaaagaacatgggcattacccttgtcacacgcagggtattactgtttttattcattcaaaagttatttaacgagctcctactgtggtgagcaagtccagtggaatccaggcccttgctctgctattagagggatgagggcctttctcttcaaggggagattccctttccttgtgtcagccttacatagtcctttctgggtttcctaatggtggaaccaccaggcagagttccaagatggccaagccttcctcccttctcttcctaaacttcccacagctatttaagaagtacagatgacttcacagcccacgggaggcatggccaatagcaccttgagaaaacccagccctttttagataacctcctgggacacctgtatgtgtgatataaactgtcctcacagctggccctagtcccatgtggaagtgggttagaggatgatgatgtttgtagcatgctggagtttggagtctccatgccatgggcacactcttccatactgttgccctcactctgacttcttcaccctcacgtcactcccttgctgctgttgagtgcctagaagggacctttccatgatggctatggtgggagcgagggatgttttgccgtgaaattgccttgaaaataaaatagtgggttctatcactgtaaatactcagctttctttggacaaaggacattgtctttgaacagatggagaatattgaagaaaaaagatgtctctaccatcaaattctggacacttgagtgaaacagttgaataaaaagaactcagagcattgctttttttttgagacgaggctcactctgttgtttgggctggagtgcagtgacacgatcatggctcactgcggccttgacctcttgggctcaagtgatcctcccacctcagcctcccaagtagctgggactacgggcacgtgccaccgtgcccggctaatttttatagagatagtgaagaagggttgggagggtgtctcaccatcttgcccaggttggtctcaaactcctgggctcaagtgatctggccaccgtggcctcccaaattgttgagattacaggtgtgagccactgtgcttggcatatatttatttatttattttgtacacagactagtggataatttggatactttgacttcccattcacctttctgttttttgtttttttcttttgagacagagtctggctgtgtcacccagggtggagtgcagtggcacagttatggttcactgcaacctccacctccctggctcgagtggtcctcctacctcagcctcccaagtagctggaaccacaggcgcatgccaccacagctggctattttttttttttatttttgtggagatgggggtgtcactgtgttgtccagtctggtctttaacgcctgggctcaagtgatctgcctcccttggcctcccaaagtgctgggattacaggcgtgagccaccactcttggcctaacctttccgttttaaggaacaatagtagtgtttttaaggaataccattaagaaagaacattaggaaaaaaggtgctttagttctctgagtgacttcttttaagcttaagacaagaattatcacttacttactaagtaatctgtgggctgggcaaggtaggctcgcacctgtaatcccaggactttgtgaggccaaagcaagcagattacccgagttcaggagtttgagactagcctggccaacatggtgaaaccccatttctactaaaaatacaaaaattagtcaggcatgatagtgcacacctgtaattccagctactcaggagggtgaggcaggagaattgcttgaacctgggaggtggaggttgtagtgagctgagatcatgccactgcactccagcctgggtgacagagcgagactctgtctcaaaaagaaagaaagaaagagagagagaaagagagagagagagagagaggagagagagagagagagagagaaagaaagaaaggaaagaaagaaagaaagaaagaaatctgtggaaagcagttgttggttcagtgatagaaagagagattcgcaggtgggggcagggcaggggccaggctgggcttctgcaggagtcaggtgcggtggatgttgcagcgcaggtatagcagccctgggggtttcttctcattggtcagcaggtggcaccaaatagctaaaacttatctggggagaggcatgccttgcttgggttttaccttgggttgggttggattaaattttactttctgtactttcagaatttgggattaatagcactttcacattttctccctagagatagaatcctccaagtttgaattttataaaagtctctgatattgataatagtcatgaaagttaactatattcaagatcagatgattgcatgacattattaattttcattttttggaagggtttatgactttgaatgttaaatgccactgtaagatcattcaatggaatatacttactcgattagatttctgaagtttttgtgtttttatgaaatcccataaataaattgctaacgtaggtgtgaaaattaatacacccgtgaatgtacttaattgagattgagtatgtctctctgatgagaatccaggattttacttccattcaggatttttctattagagcagagatgggtgacagtttgagtcacagatgttgtggctcagtggtaaagtggattcagtgcttcttcctcaggaacatgtggggtgtgttggctgtgttcttggatagcatgtgagaaaacagccatgacaaaagagcaggcagttgtgtgctggtaccacccaagagcctactgtttatttaaggtgcagttaatttgtttcagcttatttactatggaaacttggttgcatgtggcatgtgtggttatgtgctggaacttttaaaaagctgcatttcaagcacgataaatgtttcttttctacatatatgggtttgtttattttttgtgtggtggcatatgtgagggggaagaatcatctcttgaatgatccttctgtgttgctgagtggtgtctggtttggttagcacgcaggctgtggtgaggaggcctgctgactctggcctaggtgcacatcttggtgcacactgaacaaggctttcactaagtgagcatccagctacaaaaacctgacaataaatttttgagttttaagatgttgataacagccgggcatggtggctcacgcctgtaatcccagcactttgggaggccaaggtgggcagatcacaaggtctaggagttcgagaccagcctggccaatatagtgaaaccccgtctctaccaaaaatacagaaattagctgggcatggtggctcgcgcctgtagtcccagctactcgggaggctgaggcagaagaattgcttgaacccaggaggcggaggctgcagtgagccgagatggtgccactgcactccagcctgggtgacagagcgaaactccatctcaaaaaaaaaaatgttgataatttattttttttcttgggatagcttcataccactttaaaaggggtgttgtcttttcactcctttcttcctacatttgcagattaacaacttacttagatagcttcatatgcctgactgagcctgtttccccccagtgaaatttaaaatatgcgggaatttaaccacatttaaccacacccataggcatcaggcatagcactagctcagtttctcaatgtctcgggtctagtcagtccttcaccaggccctgtcagttctccctccaaagcacatccacctctaagcacatccacctcttaaccatccccgcttctccacccagagctgcaccgccatcatttctggagtagcctcccaagtggcccctgcttccattattgccgcctagaatctgttttccacacagccctgggaagaatattttacaaatacactcaagggtggtgtcggttattagcttaaaatcctgcagttgcttcccgccacacttgggctcgcccacctccctccctaaccttgtctccgagtctctcccgctgcccactagactcagccacattgaacttgccgttcctcctgcatgctatgctgcttcctttgcctgaaacactattattcttgatctgtgcgtgactcattcctcttgacattgagttctcagtttcaggacccactcgagaggccttccctgatcaccagatctaaaaatagtcacatgactctgctgtcatttttttttatttaaactatcttgccttttcttgtgtgctttttgtccagctcctaccactaggatataagcttccctagagccaggtccttattgcgttcatttttatccctagcatctggtccagcacagagtacgtagtaagtcttcattgtattttggttcaatgagtgaataatagctatattgaagggagaagctgtgtttaaagcttatcagttcaggataaagaatagcaagcgtgtattgagcatctaccatgcactggtactgtccttggttgccatacacttacatcttaattttttttttttattggagttttgctcctgttgcccaggttagagtgcaatggtatgatgtcggctcaaccaaaacctccggctcctcggttcaagcaattttccagccttggcctcccaagtagctgggattataggcatgcgccaccacgcccagctaattttttatttttagtagtgatgggttggtcaggctgaactggaactcccgacctcaggtgatccgcccgcctcagcctcccaaagtgctgggattagaggcgtgagtcactgtgcctggccttacatcttaatcttaagcatcagttttctaatatgtaagtgagatgtttagataaaatgatctgctagttctcttatataacattttatgaatttccaggagaagcttaaagattataatttatggtgatacacaatgggaataaatgagttcattcagaagccccacgtaggtgttgatctacctccgataacatttctttttttttctttttgagacggagtctcgctctgttgcccaggcaagagtgcaatggcacgatatcggctcactacaacctccgcctcccagattcgagcaattctccctgcctcagccacccaagtagctgggattacaggcatgtgccaccacgcccagctaatttttgtatctttggtagagacgggttttcaccatgttggccaggctggcctcgaactcctgacctcaggtgatctgcccacctcggcctcctaaagtgctggaattacaggcgtgagccactgcacctggccctctgataacatttttaaattgcagagtttaaactttagaaagaaggaataaacccaccattttgggggtatccatcatctcattcagtcctgtcaacaacctctgaagtatcttccctctttaatggttggggaaactgaggcttagagatactaagtaacttggctaaggtcacacatctattatgagacagtgctaaaacctaaaaccagcattgctccagaagacctattcttggcaagcactgtttttattttctgctcactcttatcccagttggttccgtggggactgtatacacttcagacgtctaaatgtttttccttttctttctcatagaactctaagaaggagctgatgtggaggagcagctgagacagttcaagatgacgaccacagtagccacagactatgacaacattgagatccagcagcagtacagtgatgtcaacaaccgctgggatgtcgacgactgggacaatgagaacagctctgcgcggctttttgagcggtcccgcatcaaggctctggcaggtgagtccttcacacctgtcacagaggcccaggatgcctaaaatcaggatgccccttaaaatcatccaccctgttcccatgacgctgtcatgttcgaaggttgtctcacttctatttaaatgtgtccttgagagccagctgaccattttataaggtagtcagttccatatttggagagctgtcaactctaatggccaaaattattcagagcacagagtgttatttatagcaattcaagaacagctgccctaagtttgtaagaattcttttatttttgacaaatcttacattccaaaatatcaaagcatactattccttatactcaaaaatatacaaattaacctgtgtacttagtgcctgtgatacattaactggcctgacctgtaccaagatgggttagtattacacgcaaggattttacatctgaaaagcaaaagctgaatctggtaaaggcacatttaatacagtaacgagtaagtttgccattggtccattagttcgtggaacatgtccttactttgtgatttctcattcccttgttgctggtgaacacctagagcacactttctccatggccccagtgagggtgaggagtgttttaccctaaaattgccctgaaaatcaggaaagcgttctgtggctctgaaaactcagctgtactgaatatatgtaaaccaagtatcaaaaccgagttttttcaaggtcctgcatctgtactttgagatttcaaatgaaatttcagatgaagtttattccaaatgatttttttctaatgtctttaattgtgacaagtaaatcaaagtcatgacttgagaagttaagtttactgttaattctaactacataactcacatttttgttgcctttatagtggaatctgattatgaagcatgcatcatttagagtcatcttgattgtggacaaaggaaacctaacccagagtggtttaagtgacaaagaggatttattggtcacacagtaggcaaattcagtctttaagcaagacttactcctggacttaaatggtgtgaccaggatctagtttctttctctctactctggctttattttctagtgcaggctctgttcacaagcaggctccatcctgtagtcccaagatggctgccccaggtccctggcccccttggactatggacatccagcagaaaagaggatgcttttctgcttaccatggcccggatatatcagtctcactggcgtgattgatcatgacttggatcatgtgcttctcccgctggtgttggagaatctcatgtgctgttaacttctaaacaggatgcaccccttagagtgaaagtttggtcagtctcaaccaaacaagttggctagaaagattggaatataacagaaaagaggaagaggagaatggatgttgggggtacagctaacaatgtactacagaaaaactattcagctgctttaggataatttgtctcttgagtggtgttgatttaaagatctttcttgagctggcctgaatgaatgattaatcagtcactctagaattggggcttcattatcattcattaacatggaactctatggagatcatgaccctggcttgtgctagtaaagtgatttgtattttaatctctcacctctttttcttgtattttcatttgagtctttaggccagtatgctagtgatggccagttacctttgatcttgagtcttactttctgattccaggctatgtattatctcctttctaaaggaccattttgtttgcaaactacagaacagttccttgttctttgcatgtggtctttcctacagtttgagaggagagcctccagctgtccttagtatccatcatttgtcttaacctttctaggatgtttacctaggtccctcagtaactgtagtcataataatagcaagcactcaatatagtacttatactgtgtgccaggcactgtgggaaatgccggcatatattaacagttaatcccataacaatcatatgagagagattattactgtctacattgtatagatgataaaacaggttccagagagattaagaagcttgcccaagggcttactgctgctaagtggctgaaggcatactaactctgcagtgtatactctttttcagtattcagtaaagtaaaaaaaaaaaaaaaagatgtaaagctcattggcagagagcattgctagtgaggtaattcaaacatgttaaaaagatctttggaattctcaggaatgcatcctgtggtctagaagaaaccagggcaaaatattgaaaaggaaagatgctgcttccaggttaaatgatactggatgggggggcaggaattgcattcagtgaatttacaagataccaggaaacccatctgttggaggaaggtaatgaaggaaattatcttatcctacttattattttacttccttattctgtgggacagaagaatctcttgagtcctctaaaaaactatatgctgatagcaggagttacagaacaattcagtagtgtctggaatagaacagtggtttgaaaagtagagggcttgttaaagcacgggatgctgattcagtaggccttgagtggggataatttacatatccaacaggccaggtgatgccctggcttggggatcacattttgtgactgatgcagagtactgatggtcatccagtccccttccttcggtgtttgagaccacttcatctggaccgagctaaagtctaggaagaaataaagtttcaaacccagtagagttacctcaaagatacacttgagacccttttcagaagatggcaccgaaagtgaagaaggaagctcctggcccgcctaaagctgaagccaaagcaaaggctttaaaggccaagaaggtagtgttgaaaggtgtccacggccacaaaaaaaagaagatccgcatgtcacccaccttccagcggcccaagacactgagactctggaggccgcccagatatcctcggaagaccacccccaggagaaacaagcttgaccactatgctatcatcaagtttcctctgaccactgagtttgccatgaagaagataaaagacaacaacacccttgtgttcactgtggatgttaaagccaacaagcaccagatcaaacaggctgtgaagaagctctgtgacattgatggggccaaggtcaacaccctgatggagagatgaaggcatatgttccactggctcctgattatgatgctttggatgttgccaacaaaattgggatcatccaaactgagtccatctggctaattctaaatatacatatctcttttcaccaaaaaaaaaaaaaaaaaaaaaaaaaaaaaaaaggtccacttgatgtgggagtggtgtggtaggctaaccacttgactttgaggaaagggagatatcttcctgtcccttataggggagtgatacagtgataggcccaacaggagggagtgctattgtggggtttctgctgaacatgcatgttctaaagcgagacattttgcttagagccataaaaatgtacatatcacatttcctgtgtccctctagggctttcggtagatacaatctaatctaggtttcagtctgaattctgaggcagatctgcaaaacatgtaggaattcatcttttaatggtgtagttcatcttgtactgatagtggaaccaccacctgtgccctttactaagctgctttcagggtttatgtatctaaggaaatagggtgaggtaaactacttgttactaattctcacccagttgacagatacttcctattattaggttatctgtgaattgtaaaaaactttttttttttttttttttttttgagacggagtcttgctctgtcgtccaggctggagtgcagtggtgcaatctcggctcactgcaagctccacctcctggcttcatgccattctgctgcctcagcctctcaagtagctgggactacaggcgcccgccaccaccccagctaattttttgtatttttcgtagagacggggtttcgccgtgttatccaggacggtctcgatctcctgacctcatgatctgcccgcctcggcctcccaaagtgctgagattacaggcatgagccaccgcgcccggcttaaaaaacatttttaaaataacttttactttacgtgtcttcatcttattcaccctcaggaattgcttttaattcaatgcagtataataagaaatatatttggtctttgttctgggttcctggcatagagctcctaaaaccaatggagtctgccgagtgatgggagtgtcttttgttacccataaggtgtcccttttctgacacctgagtttgtgctaattccatgactttgggtggggatagtctcccatccctagctagcctcaggatgatgctgtgcacccaagactgagcagttagagaattggaactttcagcatcatccactcatctgtggggggagttggtgtaggtagggtggggtgccctgagaggacatggaagccccacctcaccccagtaccttgccctgtgcacttttccatttggccgttcctgagttgtaacctttataataaattggtaaacataaaggggaaattgttttcctgagttctgtgagttgttctagcatattattgaacctgagggggttcttgggaacccctgaatttacagcctgcggcctgggacttggaactggcatctgatatgggggcagtcttgtgggaccaagccctttatcctatgggatttaacaataatgtcaggtagaggtgtcagaattgaattgaattgtagcatacccagttggtactggggaatcagactactaagatatttcacaggggagatagcatctctagtatagtaggcagggtgtcagctggttttcttgtttgtttagaaatggggtctttctgtgttgctcaggctagagtacagtggtagagtcatagctaactacagccttgaattcctgatctccagtgatcctcctgcctcagcctcttgagtagctgggactataagtgtgtgccacaaagcctggctatatcggtttttgttttttgttttttttttttaatgtagaaatcaggcctgtgatcacttgtccagtaccagcttatcattacaacaatgaatcggccagcaatcagtcacttccagtgcctagttctttcattttccttaaactctgctgcttgaaaatcagtctgattcatatctgcgtcactcatcgccacccccagctccttagtagccagaaacatcagcgtgatgatcaggaggaaatacagagaacttgacctggagcacctggcaggattgaaagcaacagctttttctccaagcagagaaaagcttcatctgaaagcttccccctcatgcaagttgaatgataagaaacctcaagtcttcagcttgtaaaaatttaagacttagatgtgttttaagaaaataattagaattgccgggcgcagtggctcacgtttgtaatctcaacactttgggaggccgaggctggtggatcatgaggtcaggcgttcaaaaccagcctggccaacgtagcgaaaccccatctctgctaaaaatacaaaaaattagctgggcgtggtggcgggcgcctataatcccagctagttgggaggctgagacaggagaatcggttgaacctgggaggcggaggttgcagtgagccgagatcacgccactgcactccagcccgggcgacagtatgagactccgtctcaaaaataataatagttagaattaacattgagtattgtcatatactccaaaattttatgtttatatccaagaatatttatagatatccaaaatatattaacatgcaatcctcatgaaaagttattaatgagacactttacattttttatactacgtctttgaaatatacatcttttgtatatgtaacagactggcaagatatatacttattcctaaagtggaatgtggagtgaaaacatggtagatggtacttccccacttctgaggtgttactgtttacagtttggaaggaagctgaggagagcgttggtcaatcctgttaactagcacagtgaagtagtttttatgttttctgtaaatgattgcttgcatcccgtgattgcaggcccactttcctgacctctgaccagttgccttggtatcatggaacatgcagtgattcaaactaagctggactttttggaaaccagcattttatttgaagtaaaaagaaaacagttacacaattttttaaagactacgtcttcccctaatttgtgttgattctactgtgagacaagaaaaatgcatttctgcttgaggtgcagtaacaaaactagcacaaatttctttccttcttaactatttctcggatagaagattcattcttaacatagaccttatcattataggatttttttttcttttcttgttgagaacttttactttttcacttaaaggaagcatttgacagtcgcttctttttagcatatctgaattgccagcccagggccattattaagtcaaataagggttacctgacagttaatctgataatcaagacggctgctaagtgactaacagggagcgtctgcagtgtgtgtctgctggacaaagggatgattcacataccaggcgggatggagcgagatggcgcaagatttcatcacagtgctcaggatggcatgcaatttaaaacgtatgaattgcctatttcttcagtttttcatttcatatttccagaccatggttgactgaaggtaactgaaccatggaaagtgaaacccaggctaaaggggactagtgtgtgtgtgtgtgtgtgtgtgtgtgtgtgtgtgtgtgtgtgtgtctaaaccatttgacttctagtgaacgaacagagccaacctcttcctgaatatgtaaagaaatctataaaacatggcctagaatgatctaattaggaggaggaaacctatttacatgagactatatatgtatacaagtgcctggaagttagtataggcaatgattgctgtagtaagatggagtttcgctcttgtcacccaggctgtagtacgatggcgcgatcttggctcactgcaacctccgcctcctgggtccaagtgattctcctgcctcagcttcccgagtagctgggactacaggcacccgccaccacacctggctaatttttgtatttttagtagagacggggtttcaccatgttggccaggctggtctcgaactcctgaccccaggtgatccgcccgccttggcctcccaaagtgctgggattacaggcgtgagcctccacgcccggcctgctgtagtaatttagggggaaagattgatctctctctctgtctctctctcacacacacacacacacacacacacacgcacgcacgcacacaaacacacacaccccagtcattttaaggggtagggtctagtgacctaaagagcactggaacttggagagaggaatctgggacctgagtctcgtcgtggctgcttcattttccactgcagcaaaattgaagaggctaggctgcaggtctctgagaacacctctccttaaaacagaaagtctgctttgggctgcttaagatagtatatgccatctcacgcctggactcattgtctaaatcatgttagggctcttcttgttcgcacacctaacattctgttcagaggtgacactttcctgccccaagggaaagagaacagcttcttgcatggtggaatgggtttttacagagaggattaacagggatttaatagctacccattattttcctcatctactcttcaggctgtatccctaaattatgcattatttgggactatttgtgaaagaggtgtggcccctagcacacagtaactatactaccattgtttgtgaaatctgaatctgaaagagcattttatatccaagttgttcatgaaagctattgagagaaagtctgttgaggtctttgcacgtagtcctagattataccctcaatttatttttcacatataaatggtttccatggttttctcaccatagaggtggaagaatctttgctttacttttttaggtgtagttttcctctggttccttctccctcctctgtctgttcaccactatagacccagtttctcccctgcttctgaaatcagcttggattccttctcctgttctacctcagactctcttctcacctcagcaatggctgaaatctcacagtcgctgaggtgagtgatccaggcatgggagaacatgcagatggaagcctcgtgctcccagagtttctgactattcaccatgcactcatcccccttcctggcccagcccctattcctgcacctcactctttgagagcccaggttctccttcctcagtcacctcagagaacctctcttgatcctcattcccctttttgtctcctgttccacccctagcctttgtctgaactcctcattctctccactccaccagaattctttccctaagtcactcacttacttttgaggcgctccgttcttctgtgaaaaatctcatagaattgagagttgatttatgactgaattaaaggaatacaattgctcttcatttggggactgcctgtgtaagcaaaagaggaaaaatgtatgtgacctttctgccttcttatccttttcctggctctgtctgcatacatgttctctcacacacacatatcagctttattgcagtacaatttacataccataaaatataccccctttgaagtataccattcagcagtttttaaaatatactcagagttatgtgacaattaccactaattccagagcatttttattacttcccaaagaaatcccatgtacgttagcggttacttcccattttcctttcccccagccccaggcaactactagtctacattcagaccctatggatttgcctattctggacatttcctaaaaattgaatcatgtaatctgtggcctttttgtgtctaacttctttcacttaacaaaactttttcaggtttcatccgtgctgtagcatgtatcagtaccttatttctgtctctgctctcttagataagtaatagtggtagattagagagaaagagcagaaaatactctgtaaaagctactagtaccatagtgctgtgatttttatttggtggttgcctggaaacagatggcaaatctgttgtaggcatcagaaactactgtaggccagatgcagtggctcacacctgtaatcccagccaaggcaagtggatcacctgagatcaggagttcatgaccagcctggccaacatggtaaaaacccatctctactaaaaatacaaaatgagccggatgtggtggtgcacacctgttacatgtgagtaaccacctattcaggaggctgagacaggagaatcacttgaatctgggaggcggaagttgcagtgagccaagattgcgccattgcactccagcctggctgggtgacaagagcaagactctgtctcaaaaatagagtaagtactgtagacttaggaagtttttcatttccccaaatgtggtcatcataaaggcctattggtgggtgtttggtgtctcagatggttctatttgttgccgttattaaattcacttacacagttaacccctttgccagttttctaccaaagtggacctgtgagaaagtactatcataggatgataaaaggtataaatttaatttatatataaggcacttgtaaagttatgtgtattttaaaaataaaacatgtcccatgataaaagcaaactcagaatgacacaaagtatatttttaaatttaacagtgcaacgcagctctctagaattttatttaacctccatcttcagtgataccattcaatttaattttctaattaggagagaaaattgatgctaggtagatgttaaatagtttcttaagttgcatttgatttttgataccaagtcaattaaagaagatagttgtgattattaagctataaattcaccagtagtttgacatgatcatattcaatagcagtccagtggagaggggtccaggtgacagcagagctaaatatttggtctatgtctaatgattgacttctgaaaaaaatcatgcttagaaaattatttttggttaggtccttctggttgtaaggaatacagattcacttgagttctctgaacaacaaagatatgtgtgtggtggatatggggtaaaagaaggagaggccgggagctgtggttcatgcctgttatcccagcactttgggaggctgaggtgggaggattgtttgagtccagtagttaaagaccagcctggccaacatagtgagaccctgtgtctctgaaaagtaaaaaaaattagctgaacacagtggcacacacctatagtcccagctacttgtgaggctgaggtgggaggattgcttcagcccaggaggctgaggctacagtgagccgtgattgtgccactgcacttcagactgggtgacagaacaagaccctgtctttaaaaaataaatacatacatacaagagagttattacaaagtttcatgcaaatgagccctgaaaaatctatgtgacagtggctgctgtggacctggaggcattacttatatttccgatgggccatgcgcctcattcattggaaccctctgcttagtatctgctcctccttgactcagctcacatgtggctttggtatactgtcattccaaccccagctcttgcctatcctttgccttttgtcctcattgctaaatgactgaatatccttgtttcctgtagttcaaatgtctgtaaggttgggtacagagatggggttttgattgacccggaagatccttttataccagatcatggccaaccggatacttagagtggataccttcagaagaggtgtccccaaacattggtgaggagctggaagccatatgtacagaacacatcagctccatccatccatagctcagaggcatctgactggcagttggaggatactgttggcatgcctaatgcagaagaattgtggtggggtggaggaaggcattttatagtaggacttttggggaaagagactggagtatcttggatgatcaagggaagggctaaatagccaatctgaagaaagggtgaagggcccctaggacaacagaaattaaggcttttcatctctccatctcttgttgttagtgaccttgtgtaagtgggcttctgtctctgccccttgtaggtagtcttctagatgacaggaaacatggctgccatctgctcctgggcttcactctctaccacctttcattttttctggttccagttggaaatattaggggtgtttgggagaaaggctgtaatttaccaggctttactcaaatgtctagagcagtgaactggagtatggagtgtggagggacataagagcatggcagctctccctggaaccacatggaactgtttcccccaaaggggaaagtttgctgggaagatgacagtaagtaacaatgaatgtttacgacacattttcagatagactgatgttcttgattcagagataaagacattttataaaatgcaaggtgatgtttaccattggttggttacttaaaaaaaaggagcccaataatggacagtttcatttaagatttttgaataaacaaaattaacaaagagaaacaaacattagcgtttcagtctttagaatatgcctttaacatggtgtttcatttgcattgaagttattgtcttgtgaatatgtgtggttgataacttggaaacagtctatcccaagcttgcatctttggattctcaagaaccaagcatcactcttagagcatgacaggtgcttagtactagagtgccattctagattctttagcagtacagtgatataagtactctattaacactttgttccttactcacatgtaacctcttttggggaatagacaatgtgtataaaacaagcaatgaattaatatgaaagtgttgtgatacttcctgaaaacctgaatcttagccttttcatcctctggttgagaaatacatctgttttctacaattcttatttcttctgtatttttattagttaatcttcaagggaatttgcagagctctgaattttgacctctttgctgcaagcctgtgaattttcagaactctcagataatgacatcattgactgatgggtacctgttattgggtgaggctgataagaattttgccattcaggtttaaatttctgcagacgccttagactttttgaacatgtatgtgaagtcgccttattagtcacaagattgtgtctttaggcatcctaagaaacagatggactgaagtcggagatgccgggccatttgcgggttctcagcccttccctgtgttacatgtttacctattggttcactctaagtttgcaggaaacccaagctctccccactgcctccactctgagctccagccctggccaggagccctcttgcctgtatggttcacagtaacctttcctcttcaagaaacttccttggcccttgctattctgtaccccatgttctctgtgtcttattagtgtcatgtgtgtacttaggtgggtgtatccatagtctccctccagctgatgactaaattccttgaagacagtgacagtggtaacatttgtttccacattccctacaagcacctcacctaagtctgaatgcacctctgctttttattgagtgcttgtcagactgaagaactcattcatggtcagagctattaattatcactttcatctggggaaaatttcctcctaatttttgtgatacctattaaagatttctttgtgtttaataattttacattaaaatgcattataaaatcatgtattacattgtacattacagtgcatgcattgcaaaaaaaagttcaaacactgcagaagtggacaataaatgtttctctttccccaaagcctttcccatctttctccctaaagataattccttttaaaagtttgatgtgtatcttttgagatattttctgtgtacttttttgttgagacagggtcttgctctgtcatccagactggagtgcagtggtgcgattttggctcattgcgacctccaccttccgtactcaagtcatcctcccacctcagcctcataagtagctgggacaacaggcacacaccaccatgcccagctaatttttatatttgtttggtggagacgaattttggccatgttgtccaggctggtcttgaactcctgggctcaagaaatcagcccacgttggcttcccagagtgctgagataataggtgtgagccactgtgcgtggactctgtgtacattattgaaaacattatgagctgaatgtttgttcctcccactcaaactcatatggtgaaatcttaacccacaccatgagggtgttaggaggtgaggtctttggcgggtaattaggtcatgaaagtggagccctcgtgaatgggattcatgtccgtataaagtagacatgggaaatgatctttctccctaccatgtgagaatctgagaggatggctgtctgtaaaccaggaagaggtccttcaccaagaacccaaccatgctggcaccctgacttccagcctccagaactgtgagagagaaatggttgttggttaatctcccagtctgtggtattctgttttagcagtctgaactaagatgaatttttcttttctagtaataaacagaagtaagaccagctgattgatagaatcctggagtttaatctttctcctaccagaatatttgtcttagattttcattctggcagtgtctgtatgatgttaacatgctgcaatgttaacttggtagagatgggtttgggaaatttaaggcattgtttgctagcttagtagaagccattacacagtgactcacacgtcctttactgtggatttggcccctgccttcttttgtgctccaggtatctcaccctaaggtttttaccctttttggttaaaagaactaaagctaaagatttctttagttttctcttccttccttaggtcactgggatgtttctggagctcttccccctttgcctctttaccttccatgttccttggatatcaggggcactcagtagagggcatctctaaagaaactatctccccaaggttggcctgcagtttgcctgtgttattctctgtcatcattagcctggagtacatgttagcagttgaagtttgagaatttcatggttaatttttccaaacgttggccacagttttcctggagaactgtattgtgacaaggacatacagagtattaggtgactatagtgaccaagcaagatagggaatggaatgttaaaattgtagtagtttatacgtagattacctctattttgctgcaacagccaaaggccattcatctgcccctcactgtagagcacaagtggaggagaatgttgtcgtcgttttaactgatgtgtaatttaagccttttttcctgtggttaataacaacaaaaacaatctagtaacttcctaaatccatgccactagcagcatgttatttagccagtgtggctctccagttagcttttacctttttctctagccagggacatgtatttgacagttccatggattgccagtcccaaagctgttttatatgccgattttggagaagtaagcctacagaccaaatctattagccccattatatgtctctactatgaacatacacacttttatgcctagaactgcagaggatttgtgtgtgcttccagcatttgccctgggcccctatacacactgtccatggaattatactcattgtctccaagcatttgaaggaaggccagtgttagtatggatgcttgtaaataatgtagaggcattcaagactaccttgagaaatacaggatggagaagaggcgaggctggaggatgcacttgatactaatgtgaaatctaaaacccctcacactgaattaacagttgttcccgtgcagctttgtttgtgcattcatttaatcagtcgtaatcttcaggcatgcccacatgtggattttctttttaactccctcacattcagggagccattttaattgacatacgcaacacaattattgtccgaactgaattttatgatgggggatgatgtttctatgttttaaaaaactcaatggatgacttcagagtactcatggagatgtaacctataactgacttgtgattttgaaagaaataattttcaaccatttcagtaaggaatatattttatatggcaatatagtacacataaaggtatgtatatttgagaatatacatacacataaatgtatgtttatgggtgtatttgtgtgtatccacacacatttaaatttcacaaagtagtgtttacgtgtaccacatgagatgctctgatactttctattctattccattttttaaaatgctagcattgatctattaattcaattttattacatggtgttggaatatcctgtggtagttaggtacatttcaaagtacacctaagtgatctatttttaagctttattagaatgagtgcttattgattttgtttcattcatttattagtgaatgaatgagtaaaatatttgagtacttaactatgtgccaggcactgtgatcggtggtagaaacacagttaggtgattaagtgaaaacaagtctgtggtcagcagaaaagattttcagttttcacagaggagagttgttgtcagtagatgaaagggatttcaggccaagcaagcagtgccatgaatggcctgaacatgcatggctatgtcgagatgccatgagaagagctgcagaaggagctcaaggcaggactataggagtgaacgaggagtgccgtggtgccaaagagtttagcctttatcctgtaggccagtggtttccagaatctatctcaggagaatttttattttcaaatagaaaactgttaattaatctcaatatgtaaaactaccaacttggagttacgctagaagcagcagaggaccctcccctagatttccatccccagggggctcaaggccattgtgactgcccctgagaaccactgatgtggaatttgtctcagaaggatccctctggggacactgtgaaggaaggcacagggaggaacgccattttaggggactgttgtgttcttccagggaagaaacaaggccctgaagctgagattgtggctgagggcttgagaaagcagggccttttcaactgttgaattagacttcctaggacatgctctccaaggggatgggaaagggaagaggaaggaagaggaatttggtttgggttctgtgaagcctctggatgttggatgcttgggatagatgagggtcgtgaggtattttggtcacaaatctgcaaggtttcccctttctatcgtgtggcctctagtttttaggattatgtttttcttagctcatatttgtctgtattctgtccagcctttggaaactgtatgggccctgaggctctctcagtctgcctgtctgaatacactttggaggtcctcccactgctggagcacctgaatgttcctgggtttggattcagctatccaggactgtccatctcggggctgatgctgaggaaggaaggatggcttcagaggcctggagtcccacatgaggtccctgctctgtcgcctactagctatgcgatggtgggcaagtgactcctttaggatgaggataatatccaccttatgggaatgttgcaggaacttaaaataatgtggaagattcctagctcggtgtctgcacacagtgggcatgcatgtgaagtgttaattataacatttcattatggaaataaatcttttgaagggagggcttctatttcctccctgcaaaaaggccttccatattgagaaatattgcattcatgcaagggaagatgaggagaagccaaggaggaggcaggaacattcaaaaggcacatgttctgatggcctgacgacactggggacctgtggctttgtttgctgtgaagtttagagggcatttgtgaccctcagtccttctcctgggaagcaggaaaagcaccaaaaaatacttgttttttttttaattaaaaaaattaatatggtctttgcatttgtatcttctctcactgtactttcctgtttcggatttgcactcaatgcacattaaaatgatcctgcataatcctaaacatttattgagagaatgatttaatggaaaaatacaataaaaatattttaaacttttgataaattggtcccccctcccaccccaaaaaaaatgactgaggttggaggaagagacagatgggagtgggagatgcatgttctttggagggagagagacatggtcagtgtagaacaatccaagtcagacaggctggctcttaccggaagagggttggtccttcatgggggttatttagctttagtgctctgttcctctttgttgagacagctgtagttaggtataaggggataataaagaagaaatattactaaattcccgggaggattatttataatacttaaaatgtgtgtatcactttcatcttggagaacattatagaacattactataatactaatagaagtctttggaaagcattatatcccgtgttacagatttcagtctgagattttctgaatcaggttgttgtttaccccagcttgctctagtggtaatataaatcagaggcttctgggttccaggcagtaattgaaagcttctgatgcctatctttgacctgccttttccaaccttcttggaaattgccttccttcacataagtatttgtagggctctgaatactctttaattaatggggggaaaatcttctacctctccctacaattactccatattagcaaattatgagtaagactttgagatacctcaggtatctcatttgtgatgtcagagtggttattgaacttactaaacctttcccagaagagccagaccttgcctaaacttaacgaaaaggtttagagttgagaatcagatacttttacagggtcatttttgtctgtttgtttctgactgtcaagcacaagagatacacatgactaatttaaaacaggaggcctaagagacctattaaaaaatgtcaaacatttatttgtactaaatactacatcaaaaagatatggcaatatgaataagatatagagatataaaatatatcctagataggatttttggtaggctatacaaacttgaacaaagttttaaaaaggagtaaacttttatttttttatttttattttttattatactttaagttctagggtacatgtgtacaacatgcaggtttgttacataggtatacatgtgccatgttggtttgctgcacccatcaactcatcatttacattagatatttctcctaatactatccctccaccagccccccactccccagtaggccccagggtgtgatgttccccgccctgtgtgcatgtgttctcattgttcaactcccacctatgagtaagaacaagcggtgtttggttttctgtccttgtgatagtttgcttagaatgatggtttccagcttcatccatgttcctgcaaaggacatgaactcatccttttttatggctgcatagtattccattgtgtatatgtgccacattttctttatccaatgtatcattaatgggcatttgggttggttccaagtctttgctattgtgaacagtgacacaataaacatacgtgtgcatgtgtctttatagtagaatgatgtataatcctttgagtatatacccagtatactgttggtgggagtgtaaattagttcaaccattgtggaagacagtgtggcaattcctcaaggatctagaactagaaataccatttgacccagcaatcccattactgggtatatataaaacggagtaaactttcatttaaggaaggatgaagttaaataagcaaaggtacccagagaccccactaagtgatagatactagctgaatgctttatttaacaagcctactattctattgctaacctgccattagaaaaagctggcagatggacattaaaatccagcaaaactatttttaggtaacaaagctttttgatggcatatacaaaaatggattcagatggtggtgggtggggggcattgtcagtactgttactgcaatcaggagctctgggagtccactggacttctctaacttgactttagagaactccatctagcctctctgtctcagtgtccttatctgaaaaacaagggggtgggctggatggattctgagggccctcagacctctaagattgtgtatatgctcttagggagttagcatgctaacgggctgttgctaccaaggtaagttttggcatttttttcctggtggtttctgtgtacacagtgagacacagagtgtgtattggtacagggatgatagcaacctttgtccttctacaggaaataatgccctgtgactctgactcaagacctagtctcttgttaatttttgttaatgttttatgcttgatgagtcagaaatgcaggctcttgtagagtgttattaacaagaactagtgtaactttgattataatcactacaaattacagacctctttcctgtgtaatgatttttgccatttgcccttccgtgatctctaataggccaactacaaggacaattttttgatcagtaagaaccttggtctgttgcttcataagcccttattatggcaaaattattcgtaacagcaaactatgtatgtacccacattgacagaatatcagtgttctttagctggctgggcaaagtctaagtgtttcaggatagttgatgatgggggtatcacaaaaacttcagagtaagaaaaacttgtctgatatctgttaaagtgatctgtatacatgtaggcattctcctgtatatgtgcatacacacactcctaagttgtgtaaatgtgtacctgcctgcttgagtatgatgcattgctactatttctaaactaccaatttatttcccctgtgttttgaggactcaatctcaaagatgctgactgaaaaataaagtttttgaacaatttcatgaaggttgggttgtcgagatcatgagttctgactctaatgacaactctgtgggaaatggataaactctgataaactctatcgcactgcacacaaatgtgaggctggaaggcagtacgtaatttatgaggccttttgttgtaaaaatgagagttggcaggattccgagtaaatatcttttttcctaagggtggaagataggacttggagagatcaatgtgttggttgacagcatttgagaatgtttgatttgagcttcagcatcataggtggggaacatgtggctttatagatctgctgtttcttcccctgcccagtggtgcattccttgtctttactgaagtatgtttttaaaattcatttttaatggtggtaaaaaaaaaaaaaaaaccacataacataaggtttaccatgttaaccatttttaaatgtaacttcagtagagttaactatgttcatattgttgtgcagtcagatctctagacccttttcattttgaaaaactgaaactctacacccattaaacaataactcaccacgttccccttcccccagctcctggcaaccaccattctactttctctttccatgagtttaactactcaacatactgcatgtaagtggaatcatgtaatatttgttttttttctaactggcttatttcatttaacatgatgtcctcaagcttcatccatgttatagcatatgacagaattttcttctttttaagtaatattcaattatatgtatatgccacattttgtttatccattcatccattgatggacattagagttttcacctcttgctattgcgaatgatactgcaatgaacataggaatgcaagtgtctctttgagatcctgctttcagttcttttggatatatatccagaaggggaatggctggaccatatggtagttatatttttaattttttgcagaacctccatactatttcccacagcagctgcaccatttacattcctaccaacagcgtacaagggttccaatttctccatatcctttactgaagcttttagaatgttattcaaaatacgatataatggaaaaaaggcaccaacgtggtctcaaattgtgtttttcttggtagatggtaattaaaagggtaatggtgattaaggtatcggtgataaaaatagtaatgaaaagaggtgagtggagaggtagttataggtgagcttggcaggtattagaaaagagcttagtctttctcttctttctcttcattcttcacctgtcattaaaattctagttgtggccaggcgtggtggctcacacctgtaatcccagcatttgggaggccaaggcgggcagatcacgaggtcaggagatcgagaccatcctggctaacacggtgaaaccccgtctctactaaaaatacaaaaaattagccaggcgtggtggcgggtgcctatagttccagctacttgggaggctgaggcaggagaatggcatgaacccaggaggtggagcttgcagtgagccaagatcatgccactgcactccagccagggcaacagagcgaggctccatctcagaataaataaaataattctggttgtgatgaataaatccatttgtcaggtatttttttaagtgcctcctgagtaggctattcctcaggacaccataagaataataaaggaaagatcaatgtataaaactgagaaaaaggatttttaaacaacaaagtttgctgaggccaactttgtgtatggttctacactgggctggaaagatgacatggaagctgtgcttgtaccgcatcctgggctgtcattctctctgagctggtgcaagttggacatcagagaacataaacagatatcactcatctagcactcaggacaggccttttggctccacctttgtggtggatgctggaaggcagtggggaaaggacattaaggtgagttttccctgattccaagccctgggcccacttcattgactggcatgagaaatgcacgctacttcctttgtgcttagcttcctcttccttcaggtttgctctagaaatggcagcaggaattcagaaggcctgctttctaatctccagcatgccggtagcttgctttgtaactctgggcacacggctctgtgcctcatttctcatttttcttactataaatgagatgggttggcttagatagaggaatttttaaaaggaacttctgacacctgttaggactttcagctatcatcttctgactgtgaaagattaaggtatgcatgagggggtgttacctaggctggcataggctctctgagtcaccatatggtgccacctccctcacagagtccttgttttcatcagtgttcagctttcaaaaatggctaaatcatttttaactgttccttaaagatactgggctgggggtatagggtgaaggttctgtaagacttgcatttggctgggcacggtggctcacgcctgtaatcccagcactttgggaggccaagaagggtagatcacttgaggtcagaagcctggccaatgtggtgaaaccccatctgtactaaaagtaccaaaattagctggtgtggtggtgcgcgcctgtaatcccagctactcggaaagctgaggcaagagaatcgcttgaaccctggaagcagaggttgcagtgagccgagattgtgccattgcactccagcctgggcaataagagtgaaactctgtctcaaaaaaaaaaaaaaaaaaaagacttgtatctgtcctaaaacagtttataatattttccaagagcattatgtcctccatgctgcagcatatgacaggatttccttgcttttaagtaagattctgttgtatgtatataccaattttcagagattttctatttcggatcctttggttttagggaaaacattggaaaagccaagtgaatggctcatggtcacatagccagtcagtgttaaaagctgagaatggagtgtgcccttcacttctcttgagtctgtgtctggtgtactttccattattttaattaagcagataagactggtacacaagaagagataagcaatgctctcatagagtgtatgatatgtgctggacgacggaggctgacagtgctggtgtagagtttctaagaaggagccatcatcccagctgggtaatctgggaagccttcctagagaagggaaggctttgagctgggcttgaaggatgaatggacttgggactaaaaggtgaggggagggccaagagcagaggcatggaaagcccaagacaggtggggcactgatcagtttgggtgtagcagaggggacagttaggaggaagagatggggacagacatttattgaggatctgtcttgtgttgggcacagtatctggtctttgcccatgccatctcagtagcctgagcatgggaatgccatcctggtcatgcacttgtttgaggacatcactttctccctaccccttgggacttatcttccttacagtaaaagtcaggtgtactttgatcctgccagaaattacctggtttaaaatggggagataaagcaaagagggaagggtgttttatggtgtctgtaaagaaggtctcagaggtagctatagtatttattttacagtaatctggagcctgcctcctacttacgaggcagctggcaggccttggcgctcctgagtgactgggctgtccatgaattattcaggggctgtgcccagcgagtggctgcctagcaaagtcctatggcagggaggctgtgctatctcagtgagagatcagcagaagctcaggtgctgaggaggaagaaatgactgcacccttaaaatatttcacattttaacacaccagggctgcacatgttgttccatatctctgcaactgggtaatcggtacctgtttttcaaagagcaagaaacacaccccacacccccaactatattacctacactctcatgttagaatggcacatgtcagcagggatttggttagaagcaacattaaaattgcatagataagaccgaataggaacagagagtgtttgtgtggaagaaatcctgctctgatattttctcagccaagtagagaaatgtagttgttgcttaatttagaatggtacttactgtaactatcaatagctgttactgtcactaacctgtcatttgttacatattacacccttgtgtttgtgtatgcatgtgtcctagtgtgtctgatttcctcagctaggttgaaagtccctgcagagaagaaatcagttctcaccatgtcatgggtccctccaatagcctatgcccatggatggggctgagaacgtgtcagatgagttgacttgggctctctgtaggggaggagtatgtcttgacgatgagatttgcatgtccctcacctttctcttttctcctaccctctccaagtgcctgccctacctgcccttttcacattttcttttcacagctcctggaaaaggtaatatgggtgtgaatatacttgagggcaggacccagaggcctattttcacaaagaatagatttgtatttattccttacccatttctttctcatgagctctgctacccagggaacagtatcttctcactgccccatatcactcttgtaaaactctggcctggatggctctgaacacctgtgtgtgtcagctgttcccctccatgttggaggtgaaaagcagaaccaagaactctgggcaagagcaggcctggcctcaactgcattcctcagatgttcttttccttttaaccactctacctgcaacagaggagcccagccctggctctggctgctgttacattcacaggcatagcaccacctgtttggcaaagccagggcctctggaccggggcattcttttgtctgtgcagggaagctttgcatgtgtagataacagacacggtaagaatgcagggataaggtttggctggggtagaagattcaataaactacattcattccccaggaccttgggtgcttgtttccagtgtaacttgccgtttttctcctcagcagtgatctcaggtgttttgtattcaggtctgatatgaccagttaggcaagaaacaggaaaaggatataaatggaaaccagctttgccctgttatttcagattcggctgtatacttagatggttttatgggtgtggggggaatggggggaaggtgtaaagagagggagaaagaaccatccatatctttcatggaacagagataataattcctatggatagaaaaatatcttttgtcctctctttttttttcttgttattttgagtcctgaactatcaaatctgacagccccacctcaaataaacattggcttttctaaaatataggacttctgtaacttgtttcatagtaagtattgtgttctggttatctctgaggtgtcactgctataaaatgtgattctgagtatgcctttcccagtgcataatgggctgagttaaagagaagggaagggaggggtatcagtacatcccagagggaggactggtcctgccactgagaaatgccctttgccaaaaatccagaggagtggtcacccttgttcccagcctaagttctgtgattccacatgaaacgcaacatcgtgcagctgatagcttccttggtgaagtaagagatggccaaaagtgggatagaattaatttttgaaatttctcctatgaggagataaagcctagcaattatagccacgaggactgtactataatagtatctttgtagacatgtatctcacttaatttataaattaattgagataatttataaattatctcaacctctgtgaggttggtcccattattatgccaactttttaggcacagagaaccaaggttaaaaattggcagagccagcttcttaggtcccaggtctgcttttttctttttttttttgagatggagtctcgctgtcacccaggctggagtgcagtggcgcgatctcagctcactgcaacctcaacctcccagattcaagcgattctcctgcctcagcctcctgagtagctgggattacaggcgcccaccaccacacctggctcatttttgtattttcaatagagactgggtttcaccatgttggtcaggctggtctccacctcctgacctcgtgatccacctgccttggcctcccaaagtgctgggattacaggcgtgagccaccacacctggccccaggtctgcttttaaccactttttctcctgtagcttcacatgtccaagccctgattcaaatgcttacatgggcggtactctgtaagttgagaagtggtctcacccatggttttctaagagtagtgtgagtcgtgaggggaggggaagtgctcctgactgcttctagctgcccaggccatgggccttgagtgggaggtgccactggggagaaaggagatgttctaaagaggtggcaggcaggtagcaatggcatagaaataccagtgtcaaatgtgctatgccagtagggcttttgaaaattgttcttttggggggaaaaggaggcttcatataatttcttctgtcttttcttttttgctggatttcattgtggtatgcttggttagttggttgagttttctggttagtggggaaatttccattgaaaaaggactaggtttttaacagaggcaggttttagggagaaaagaaggtggcaactagtagttagggagtgggaggctctttgggagttagtggaaagaaaagaatgatctcagttaaggattcaagagtgggagaggtgggcaagaggttcctaggaagggagtgggtgggccagagaggtaagacagaaagagaactagagagatgagatagaaacataatataaaccagtgcttagtgcagcataaatgcagtggcatggtttggagccgcttctctatctggccacgctaatggaagaggattattttagcattattttggtttcctgtaaagaaatgcttaggagaaattggctgtggtcatccaatgccaagggacttgacaccgatgaagaatgaaagacagatgtggagatggcagtagaaagcagcagagaatttgacaaaacacaatcctatatgaaactttgttttctgtccctccctgttcccatcacttctttcccagctctcggattggtttttcaaatcccaaggttgaatgtgtacaaatcccatcacattttgtcattttggacatcctctcccagacacactgagtcttgatagtgtctggatgttcaggaaatgaacatctaaagtttacccactcaagcttgctgtaatgcaggaaaagcattcatctttctttcccctcaagactgtgtaaagcctcttagaacaaacagaggcttaatcttaccttgccacatgctaagtcatacagaatcttagtgtacaggtccaccaagtatgagaagaggaacaaaaccaaacaagacctaataaaacccactcagaaccacagaacacttcaagcagcaagctctaggtgaactagcagagcatgtgcctaatcctgactcaaaactaaatgttgtagaggttcgtgtagaggcctgcttgggttttaggttaatcttgataccacttactgagttctgtgatttttcagaaaagcttagaaacccatagtaagctggatatactctgagcatatgggagaaacagcagaggtggggagatggggagcacgctgacttggtggatctggggtccatgtgttggttgtgccactcaccagctggggccctgggcaaggcactgtatttctgtgaacctcagctaccttggttgcaaaatggtgaccatacctgcctcacagggttagtcacttgagaaaatatatgtggaagcattctgtaagctaccaagtgtgatggttctggttattacggccattcagtttaagtggagattgatgataactgggactgcagttagaagtgggacctaagcagggtgaacccaaatcactaatacatttaatactaaacattccagaaggaattttttatgaccatagattccaaactgtttggtttatagacgaagattgagaggcccagagaacatcagaaacatgctcaagattacatagctccttggtactcagaaattagggtaagcctgagtccctgactctggacttgagtctttccaccagcccacagcacttttgatctgttccatccatatctttgagccatcttcccactggccttttcctacctatgccaacttagggctgaaacctgtgcacagaggacatactcagttgggccctgccttggaacatcttcccctgagtctgataaccctcattcactagtctcatcttcatagcttcttcttcgtcctcctcctcctcctttctcgttattttctaactccctgtaacccagcttttgcttttattaacccagttgacctgctaattggcacaccacatgccttttctctaagttttattttttagtttgtttgttttgcaacacttaagaccatctaccctctttcctctttgagtctctctccttagattttcattctgcaactccctggcatctccactggtttttcttctttctcccaaacccaggccttccccagggctccatgcttagccccttgcctcttacttcctttcctagatttaaccccacaactatctcaactcccacctctgcactcaggactgtatcttcagttttgagctctagttccacatccctgactgctccagacatgtcacccagtggtattgcaggtaactcagattccacctgtctagaaggaaatgtgcacttgtcccctgcacccctctagccagatgtaaaaccctgagagtcttctttgtccctttcctttgatcctcccacatacagttagttaccaaagtcctttggattaatttttacgtcagcccattctttttcatttgattgctcctttgacctggactgttgcactaaccacccagttgaccttgctgccttcatttcctctcctttctgcccattcttacataccacttccagattaatcatctctagagtccagcccacaccctctactcccctggctcaaaagtctccagtggctccagaccaggcttagttctaacttgcttttcggggctttcctcccagcctgacggttccttatcctccagccaaactgcagcacttgctggtgctgtttcctgggcatccatgcttttactgtgctgcttgagaggaggcttctcccttgttccagcctgttgatgtctacctgtgtttcaaggtttgatcaaaatgccagtccctcctagagttcttcccacctacctttctccaaaaggcagatgtgtcctccttgtcctctgaattcttagagctgtcctcccctggcccttactatattcttttggtactttactgtttgcacatttgtcccatttcctttggctagcaacactcctggtcacttctgaatcttctaaaacacctggcagtgtgccttgcacacattaaatactgtaaatacagaacagtaaacactgaagaaataaagaatgaatacctctggccttcctttacctcctccccacttctgaactggaggtggtcagatgggccatcagggatctgtcttattcttccctggtcccatcacaccaaatggattcccatttcttacttcttatccccgtggggttattaaacccttccccagtgtccaaacctttctaatacttgcatgtgttcactctgcctggttcattcagtgttggcttcacaggattgagtgtggctacgttcgtcccagctctactgccatcatattatgtgcaacctggttaattaaaaattatttcatgtactaacccatactagagggagctgaaagggagatactgagtggtgactccctttcttcattaagtggcccaatgattaaaacgttataagttggcaaagcactttgtaatctcattttcagtgccatagctggacacttagagacttatcatttcaccagtatacttagttgtgaaaaagggcttgttaaaaagatcttcattgagacggttcccaattcaacttctcttgtagtcttgatgtggtgtgtgtgtgtgtgtttgtgtgtgtgggcggggggtgatgaaaggaggggtgcattttgaagaatatactcttaattttgaaagtatgataatttttagaacatttccacatcatctcctcagtgaccctgtggaggtgggcattaattattactcagtctgacagctgaggtttagaaagaatccagggtttcttctaaggtcatagggtaattaagaggcttggccaggactagcaactcaggtcttgggaatcctagtcaagtgctttttccaagaccaagtgttttgtaatgctctgcctagcctcccatcagcattgtgaattggcagcacttaggggctttaaaaaatgttctacatcttagatgataagaaatgttgtcttcttcaggttgggcctggctttcaaaagccaaaggttgacatgtggaagtattaaaaacctagttatgtggctggaaggagttgggggttgttcagcgttgagcagttagctaggctctgggtttaattctaagcctggacaggatgcagttacttcaattacaagtgccctggggactgaggtgaacctggggtgggggaccacgtctttactacatattgggatccctgaggaatgaaattaccttcttcagtgagtattgctgtagggctccaaactggaaatgccaaaagtgtaatttgttgtctgcctgtttaggtagtgaggaaaaaggggggacaggagggtggagagagaggggggagatctagagtcaatttcccaagaatacattttgatcattctcttttctatgtggaagatttcatttttggttgagattggtgggagaagaagctgggaaggagagatttaaaattttggagaaccacaagtttagaggccttgttttacaaatcagagtaggaatttgagggtagtttcggttccctcatctcccctccggatcataaacaactccaggtcagggatctcggcggtgtttacctgtgtacctttttcccacaatgccttgcaaatcggtgctcccataaatcttccttgcgtcgaattcctatcataggcccgtgttattccaggaaaccaccgccttcatatcccctgatggcagcgtaagtcagccgagattcttcactgagcccgaacttacacctcccctggctgtggcgctgcacagcgccctgagagtgactttgtctgacttcttcccggtggctcgccgggccgccgccgcgtggttggcgccagcgcactggggcagtcgcgcgcgcccaggtgcgggccgcgttacctcagcagacgctagagagtgaatgagccgcgcgggcccgggacccttggggctcttcactctccaggccgtcccgtgggcgcgctagccttttcaagtgatagtaatcggagacttttccgttacatgaggctcaacaaaagattgtaattccagcagctctgtttgggaaggcactaccgcggcgagtccagggcccggccgggggtcggcggctgccgggcggctggggcgaccgcggaccgtgcgggaccggtagggggtcgcgggccggctaggctcccccgcgcccctcctcgtggtatagcctgcatttctaatacaatgctgttatgctaatcaggtgacatcaccgcccagcacacggcgagtggctcctgataaaattacaaaccggcggccgccgcgggcagctgggaggaggtgtgcgcgctgcgcccgcgagctcccgggctcggcaaccgtggcatgcttaggattggccatatttaaaagttctgaagtagaacctgcgcctcctctctgcttctccctcctcctcagtaatttatttcgagcttccaggcaagggccacggaagaagggaaagcaagaaattagatgcctgtgtggtaactcctcgcggagctaaggtggactctcttgcagccaacttcccatcagatcaccctgctggacttgcagaccggaatggggctcgcctaaggagccgagcgctgcggaggctgctgcgtgttggatgggagtgggagggggctggagcgagatttccagggcgcagtcctccggggcgttacgccgggcataatggaattgcagaggacgtctagtatctccgggccgctgtcgccggcgtacacggggcaggtgccttacaactacaaccagctggaaggcagattcaagcagctgcaaggtaagccccctcccaaaggccgggcctgtcctgggtgccaacgggggttcttggaggctttatttgtgaccctaatgaagacgggcggcttcacagctcggccccagaccctgtggttggctgcgggcaccccattcacgacttagggaaggcagttgctcatactccactccagaagagctaccatttggagtccctgtctctccagcacctttttggctttctaggttgtcagataactgctgcacacacattttctttacttttagctaactttacctcctagtagatcagtgctcatagacttattagtatgcaggtatttgattccgggtcgcctctggctcccagcccccagcctcttacctctgggaagctttaaaggtgtaaagtgccgtgctcagacccagtcctgtagaacaatagcaaaggggaggagggaggggtctttttgttcctaagcctttggtaaattacagttttttattcagaagcttaattttaatttttctgatgtgttgggaagagccttcccatctatttagtgggctatataatttctaatgaaagccggttattgtcatttcaaccctatgggttggattagttggatcaattacaggtttcttggagtctttttaaggctcagacaattgaatgagtccaatattttactgaacatatttttagggagagcagaagcctgtgtgtgcaccagtgtgctgttttccctgcggcccctgcacccctcagctgtccctgcccagccagcaggccctggccagcagtgtctcagagcttatacatgaaaaaaggttcctaactgaaaacagaactccttccgtttggaagcccctggagtcagtagtaggctgggaatggctctagcactgtaaaaaagtagtattcgaggactgtgtgtttcttattttaacctcctcagtgctgcaaatgtggttcctgtgaggaggaggaaggaaggaagccgctcagccctagaatgtttttcattgggaagaggggggaggatgtctttcattcattggtttatttgtcttgtgaaatagttgacagtaatgacacttctctggaaaacgaggcagaacaggacgtgattttaaacatttgctgggctgtgccacattcctctggcagttagctcagaggaagctcccttcgctctggggaacggttctgtgtctctttggttcatttctcttgagctcttcggcagtcaaatttgcttttttgaaaacttaagctgggggcgcttgcaagtagtaaatagaggagttggggtgggggggggcgttcattatctaggtttgttaggggcctcacggttttcgggtcggagaatccactgcgtgctcctcctcttcccctggcccggactcccagcttcattgtgtcatcccgcctgggggaaagcacccaccgggatcgtcagcccactccaccgccagcctagcctggaagtctcagaaaaaaagcaaaactgggagaaaatagaaggtgtgagggaggagtgcacccctaggcccacccataacaaaaggctgttattccgaaagggctgaggaaggttttaaaactgctcgccgagaagggtggagcctacacacaggaaatgtcttaactgtcctctctggacaacgtaaagtttaaatttaaaaaaaatcatgtgcccctgatattttacctcatacgctgtttctcaaggaaatcccttcgaaaggggtaagcttcgtgttttgtgtggtagctttaaaaataattttttttagtgtgacccttgtctcctaatttagccccagtgactttcttatttttaaatattgtggtttaggagttgcacaagtttagtgttggtatttctgtagcagaaaaccacccatgttgaggaattgagaaagggtgaattaactttcaagtatggtggacctcaggagaattacacacatttgtcagcatccttcagaacaaatgaaccgattgcattttaaacaatcctaggagaattttgattaaacacacacacacaaaacctttctttaattcccatccctggttttgtgttttgtttggtatttgtagttctgattatcacatatttttgataacatataatttctatctgctgatttaattttgtacattcctgcaagggtgcctttttttactcttctgagtataatctttcctagcacataatctctgaatattggcaaaatgctcctctgaaactgtattgggttttttgttttcgttttaagagacagagtctcacgctgttgcccaggctctagtgcagtggcacaatcacgactcaacagcagccttgaagtcctggctcaagccatcctcccacctcagcctcccaagtagctgggactataccatgtctggctaatttttaaattttttgtagagacagagtctcaccatgttgctcaggctggtgttgaactcctggcctcaaatgatcctcccgccttcacttcccaaagtgttgggatcacagatgtgagctaccttgccagtcctgtactgggtttaatgcctctgatatgaacttatttatgtattgtctgtgcctgatagtgctatgatttttctggagttgtttctgcattttggctggtttcaagttactttccacactgggtcctaaaaatttcaggaggtgtgccatagaatgagatttggagttctggctaaggagaatataattttaaaatgagtctggtctatttagataaaatggtttatagcgatttatagtttataaatttatagagatattataaatttatagtttaaatatagttatatataaatataaatcgagttatatatttatatataaatatagttatatatagtttaaaataaaaataaggatagtcataaatatatagtttatagagatttatggtttgtagagatttatagtttgtagagatttgtgggtcagtaaataagtgtgattaaaaaaaaaacctcattgagatacaagagtgatggctttatcacacgaagcctcctggcataagaagacaagcccttcaacctctgatggctgtagcattcaccaccaacacccaacacccaacacacacacacccaccccttcctctttttctttttcagattttcacctgcaaaattaagttatcactttcctcagaatcagttcatgtatcgtataaagttgtatttgatgtttttttctctgttaaataaaagaggaatgttgaaatacagcaaaacccaacctcccatatttagagaactgtgtagtaacagaggtgcaggttcatgataaccatctctccacttcacatcagccagcttaactcctcatgagagaacactcatcatgccactttccccctcagaaacagttgcttgtgccattgtgtaaatgaagttccagagtctagcttggccttcaaagattctccgtaaaatggccccactccacttacttcttattctaatatattccattcaaatctggtaggcaggcctacagctttttataaaacccatccctgggtttcacgcttatcttctacattttgcctcaaatgcctactcttccatttcatctatagaaatgcttacttttcttttctttttcttttttttttttgaggcaaggtctgcttctgttgctcaggctggagtgcagtggtgtgatgatcttggctcactgcaacctctgcctcccaggctcaagtgattctcccacctcagtctccccagtagctgggactacaggcacttgccaccaaaccctgctttgtgtgtgtgtgtgtgtgtgtgtgtgtgtgtgtgtgtgttttgtagagacagggtttcaccatgttgcccaaactggtcttgaactcatgagctcaagtgattggtctgcctcggcctcccaaaatgctgggatcacaggtgtgagccactgcacccggcctagaaatgcttaccatttttaaatactatgcctgcattccaattattccataaagtttcttctttcttgtcagggttactgggaaaaacgattttgttgagtgcttaccatgtaccagtcagagctttctatatggaattttgtctggtctttataacatacctgtgaagttttagaggtgataagatagaggcaaataactcatccaagttcacaggcattgttgagtttaggctgcacggtgttctgtaactttctcctttcagacttctagatgttcatatttatatatatattttcttttaaatgaaagaatgacagtgtgaaatgcccaccctaacctggttccctctcctgccaacctgcccctggagaactgattctattggctctggctgtgaagttgtaatgtagacaggatctagttaaaaagcatcaaaatgaagtttttctgtctgctttgcagccagatgctgacactccgcatctgatctttctggagaaggtgcattctctagctattctggctcagtgcgtttgcaccaggagaggtatgaagtgctctgtcttccttgggacatagagattaaagaatttcaggtcatgaaatgcattactaccaagtttattacgtattgagagttgtcttgttgaatttcttaattttttaaatttcttaactcttagaaagtgaagtgctgattttatacctctgaatcatgaagaaaatttattcttttttttttttttttttttttttttttgagacggggtctcaccctgtcgctcaggctggagtgcagtggcgcgatctcggctcactgcaacctctgccttccgggttcaagcgattctcctgcctcagtctcctgagtagctgggattacagccacctgccaccacgcccggctaatttttgcatttttagtagagatggggtttcgccatattggccaggctggtctcgaactcctgaccttgtgatctgcctgccttggcctccccaagtgctgaccacacccggcaagggtagctattctcgaactttttgtagataaagaaatagatcgttggattattatccatctgtatgaggctagctttccagaattcaggttttctgactccaaatttgatgctcttcccgtagtaccacaaagtgtgggttagatgtggatcatggcgcccaaataacttgaatacatactgctggcatggaagattaatgtgttaagggagctgcccagatttctggacatgggctgctctcggtttttgttgcattaagaatattgacagtcaagggaataccaactttttcttaaatctaatattttactaggaagaacattaaaaggattcttggaggctagttatatagaagaggaaggtgatagataactccttttgaggaaaagatagcacttttcttaggagagtcagcctaaaatctccctggctgctgagaaagctttctggatgatggttccatgtcatcacctctcctcactcctcattcttggaaaaaggggtctgcacagcctcactgctgcttcgtctgctttagtctcttttcatggcttcctaaagtgtccccatgcagttatcccagtctccccacagcagggccctgagaagagtgctccgtgcaaacatgtctgggattcatctttgctgggatttgactccagtcccagctgcagctgctgccacacctgtaccccacagaagttgtgattccttaaacctgccctgcattttggcacccttgacaccctgccctcttggtttcttctgcagggaatcatttcatgtgtcaggatcagtcttttgaggttcagttcagatgccacttattctaggcattccaggaggttggggaggtcaacatccctgcttggactcccttccttttaagatttgaagtttcagcgcttgatcattcacctgtgatttttcattactgccttttgttacagttccagtctttgtctttttgttttccctgtatttcgtgaagtctgggagcctgaagaccaaagtctgaatagtctgtcttacacatacaagccgctaaatatttgctaaagagcaaaattaatgaagtcagtgttatagactcccttattgctgtggttcccaaattgaggttctcaaaatgaggtccccaggtcagcatcagcatcatctgggaattggctagaaatgtaaaatctcagatctccacttctcacctactgaataagaaattctagggtgggtcctaccaataagtgtttccagctactctgccaggtggttctggtgcacactaaaatttgagaaatagtcccttattggatcatttgtacaatctttgcaaaattttgtggtggggatggagaagcagactctttaagttgctcccaaacaggagcaggtattatacctgatttcttatagaagaatgaagagttgggggaaaatatgttttttagaacaaaattgtgaaacagtgggaaaaacattagctactcaggaatggactctgtcctgcttaaattagagaagccgttgaacatctgtctcagccacctcttctgcctcagatgaccctcaggtggggtcagttacctgcctcagttctcccacagttggctcaagagccactatagaaagagatataagtttagaaaaaatagagataaacctaatagtgtgtgtaggctctaaggatagttcagcaaggcatcaaggttagtttcacttatattcttaataaataatctattgaatttaaccttaaaaaacaaaaatcccagcaacttggcatctgtaagggagacagatcaatatctaggctgctttccttatttgaataactgccaggtctgcttcacaagattgtgttgaccagcaaatgatatgatctatatgaagtttccctggaaacatccatgtactattaaaatgtgaaggatggctgttgtttccatgactgtattccttttaaagaaaacttctacatataaatgaacactgacaattccagtattgttgattactagtaaatatagtacagcaattcaagtaaggacttcagggtttgttttttcttttaaccttctggaaaataatgtggacagtgacagagcattaagtttttagttaatgatagctccacctcttgtgcacataatcaaaacagaccaggtggggtttagccacttgtagatcctagtgccttttctctcttgacaactttctatcaactctgaaacccagctatgaaaaacaaatgaaagggggaaataaaggataagggcattgtaagcatttttcttttttcttttttttttttttttttgttgagatggagtgtcactgtgtcgcccaggctggagtgcagtggcatgatctcagctcaccgcaacgtccgcctccgggttcaagcaattctcttgcctcagcctcccgagtagctgggattataggcgcccaccaccacgcccagctaatttgtgtattttctgtagagatggggtttcgccatgttggccaggctgatctccaactcctgacctcaggtgatccaccccccttggcctcccaaagtcctggaattataagcgtgagccactgcgcctggcccctgtaagcatgtttttcaaatgtttaatattctctgctgcattgacttaaaagtttgacaggccaagctcagtgtctcatgtctgtaataccagctctttgggaggtcgaggcaggcagatcacctgaggtcaggagttcgagaccagcctggtcaacgtggtgaaaccctgtctctaataaaaatacaaaaattacctgggcatggtggtacacgcctgtagtcccagctactcgggaggctgaggcatgagaattgcttgaacctgggaggcagaggttgcagtgagccaagattgcgccactgcactccagcctgggcgtcagagtgagactccatctcaaaaaaaaaaagtttgatgattgttaaatcattttgttggtgcagagaacctgccatttaaaatggcagttgttggcactaacttagactactttaaaagcaggaaggatcctaggaaataaaacactaaaataaaactttaaaaaatacagggcttgctcttttggtattctacttacttattaacaaatatttattgattacctgctttccagtgagcagctgtcgtctggttaaaaagtgcatgggtgtgtttcagctgtgctgggaatgctggctaagccaactgattaatagaagcaagtggagaaataaacttgatctaggtaagaggtgaggaactgaggtaggggaatctgtgcaggttcagggttactggaccttaaagtacagagtgaggatggggtggtaggaaggattctagaaggataataaaggatgcaaggccctgttaggtaaaggagtttggacgtaaggcagtgggaaggtactggaggatttttattttatttatttatttatttatttttggaaacagggtctctgtcacacaggctggagtgcagtggcacaatcttggctcactgcaaccctctacctcttgggctcaagccatccttccacctcagcctcccaagtagctgggactacaggcatgcaccacccaccatgcccagcaatactggaggattttaaataggagaggattttaaatctggatttttaatttaattttattatttttatttgtatatattcacggattgcaagtgcaatttgctacattcatgtattgcattgtggtgaagtcaaggccttgagtgtatctattactggagcaatgcacatgatacccaccaggcagcctctcatccacttcttaaatataaatatacctatttacatttatatataaatttcttaactctggtcactgaggcatgctttattctctctctatatatatagaaaggctagtctgactgctggtatgatgatcgttttggagggtgctggtcaaggaaggagacagaagaccagtgttttatttgctggagtgagaaacttagaaacgacataacctcctagaattttgaaagtgaaataggggacttagaaccttgttattcagtatagatagatgacttggggtttgttggaaatacagcatctcaggccgacctccccacagacctcctaagtcagaatctcgtcttttaaaaatccccaagtgctttgtatgcctgttcaagtttaagaagcactgctggcagtgcgtggtggctcacgccttaatcccagcactttgggaggctgaggcgggcggatcaccagaggtcgggagttcgagaccagcctggccaagatggtgaaactccgtctctactaaaaatacaaaaatcagccggttgtggtggcgcacatgtgtaatcccagctactctgggaggcagaagttgcagtgagtcgagattgcaccactgcattccagcctgggcaacagagtaagactctgtctcaaaaaaaaaaaaaaaaaaaaaaagaagaagaagcactgccttggaagtaatggtgtctgccttctaactcctatgaacagacaaggaaatagtttcattaaatggaggagtttttggtttttttgaataaactggattattttaactaaatataaaaataatcttgagtataatagttaattaaaggaagtttagtattgctctagaagattacagggctttaaaacatagttaactaattctgagctttagaagtaagtcttttatagaatttggctgggattttcctatttgctagtcctgcagttctagaaatttgtgaggtaaaaaaacagtttcttttcatatttacccattgatattaatggagaatcacaaaaataccctgggtcagtttctctaaattattccagaatttcagcatgatgtcctgggaagtagaaatttatgagtccatacctgttttatgacttaaaccttttaaatactttaaaactatttttttcagaaacaaagcacaaatactcttcttcagccacacttcatcttagtagaatgatcctatattaaatgaacgttcctgttcttgcagttggttagacttcagtctagtttcatgcacatcaaacttacctagtggtgccttcaggttttagcgctaatagtggatttgaagtatgtgaaatatctgttacatggtaagtgctcatttcctctgagtttgtaggtgaaactttaaaattactggttattgattgggtaggggagaaaaaacacctgctgaaacttgttggccggaagtttttacccctgggaagaagaaaggaacggggtgggggagataagggaattcagttcttggctggcaacactccagaaccgtcctgatggaagggttgtggccagttgaaagcagcagtactggagaggggactgggggttgttctttcaaaggcagggttgaaggttattaatggactaagttaaatttctagctgttccttcctgttactctagatactttttatatatttattatgtcacagcagtattgacgccctgaaaagaaagaaaagtgaaagaatagttcacgtaagatcccacaagtcctacaaattttaactttccaatagttaatatatataagcacacacatatacacacacgtgcagtttagaagtgttaatatagacgagttttgtcttggctttttattttttacttaacatcatcttaagcttttcatatgtggttatttctgtgcctcttaccaaatattggcaattcactttccaaatcagacaattacttaccagtctgagagcctgcttctcatctatgggatgaaggtcatacaaattctgtgtaatgagattgttgtaagaattaggtgagattctgtgtggaaactgtgtttggcacagtccctggtacataataagggctcataggattattacagatcctagttaaatggcaaggcagggcccagcagggtgagccttgtaaacttgagtgcctcaactcccacccccacccccaaacctgttctgggtgtggtttcctttagcatgttgggagagtgtttagtttgcctgaaaatgcacccaactgaaaccattcccccccccctttagaaagattagaaggttcagtcacttgggcctggtgacttttgatgtagtttgaaggtcacaatgctggttcctctctcaagttcataaaagcctctggagcagctattgctgcagccagcgagcatccagcacttggtcagagagccgcctttgtcagagagcgctcctgtagccagactcatattaactgccccccatgggtgtgttgaatgcctctactgtgtttgcctttgaaaggcccttcttagcctttctctctcccccaaccccattttcaagaggcacaagacctttaagtagcaaatacagtaatcacagtagcatggagacacaggctggcctatatttggtttcacaaaggccttgtgaaagatctggccttaaagtccctttttaatgctgaaattatgcaagtggaaagttaatttgaggatcactgaggcacgctttattcatgaagaatgtgagcaaaacataaatacaaagtctggaggctctgttctacgctggtggcaaggaaattacataggtggtatctttatttggctgaatccccctccctccaccaagagtgcaactgtgatagaattttggagtgagagctattgttttaagcactgactggttgcaggtgtgtgtgtgcatgttgcctgaaactctctacaaaccatagacatgattttggtggaattggcgtgccaacagtggttacagctaagattgtagaagaccaaacattctgttggaatgtgaccttaacattttgaattatgtttcttaagtaagataaatttcgaaggtctattttatttttatctttattctttgaaggcctgctttaaagtttaccgtgtctttgaaagtctagtctgttgaactcttaaatcccagtgagttcctatagattgctagcttgagtgtatagtatttgagatgtgaataaagtctagtgcaaagtgtgtttcttgtgcttgaaaatggtgccctgatttctgttgagggagacgtttattcctataaaggtttaaacgacttgctgtacaattcagtcttgcaatgacagagagattacacactatctgcaaacaactgccaagcagatgaaatcctggctgtgggaagtctgcggtgaagagtggtgggggtggtcaggagagcagtggaagggaagtggctcagaacattgtagtggtggtttggcgtgcctgtcaagggctgtgggacgttttctctctcatttcagaaacaagggtggtgggaaacacatgggccgtggatttgcataaaccaacagtcaaatcctagctctaccagtgacttcactgagcctcattttcttcagggggaaagaataaatagcccttggggtgattgtaaagcctaattaggtatgttataattgtattaagaggatgacgagttcaccgtttgccagggagttttccggttttagtgccaaacattccacatccggggaatcttcctcagtcccaggcacactgggtggtgagtcccccagttatatatgaagatacctattactgttccctaattgtatgtacacacacacacacacacacacacacacatacacacacacacacacacacacacatatctataaataaagggcttctggaagctggctgcctattactgtgtacctgatactcagtgggtatttgtgaactcccaggaggatagtgtgttagtgtgtttgcgtgtatctctgtattccttcttagggatggcatacaaataaatgtttcatgaataaagggatgaatgagtaggtaaagtaatataagcagtaatgcatatgttttaaagtgatttagctggttttccttccaggggcctcttccctgagaaaagagccacttaataaatgatgtcttgaatgaaagaatacatcatgaaaataattttgtccatgatgtggctaaactaaaactccaggaagggcttaggctgggcctatctactttttttgataaaatgaagtttaatatgaccctagtgacaacctcccctcatccccttaaagctcaaatttagggaactcttgtggttggactctcacatactccctaggactctgctgggtgctggggaatttactaaactttggtgaggagaagaggagaggagagggaagccacggtactaaggtacttagggagacagaaacagttcccctagaaattagacatcacattgtctttttcccccctttcttttgaatgagatggggcaagaatatttggaccaggataaagttttaagatgcatttacactaatgtaatcaggttacatagcaaaaaaatgttaaaaatgtaccctgggaaattgaaatctatccattcttctaggtgtggcagcttattcagatttttatgttgtgtgaccataaaacgaacacagcttttctaaccgcgagtgtctttgtttacagagataacagtgtgagtaatgctttgctagaagccaggcagttaaatcacactctgagcaaatagaggctgggcttcagaaacttagatagcacacgaatgtgcaaacttggtcttttaaactgaagacatatctgaaagaaaactgcttttggcccatgaactactttcccagccctttgtgcctcccaatctctgcccccctttacaaaaaatctttgtttttcctctacaaatatacatatatgatttcaatttggaggtgggatgttatttttttcacttgaaacacaaggaagcaatttttaaaagtcatactcgttcagcagtgggcttgactgtagccagtttgactaggagttcttggctacagaaccatacacttgcagtctttatcagggtagtaaattcagatgggtttttggaaagggagagggctggagttgagggaagggcactagagcagtgtgacccacggcccaggagcagtgtgagtgggaaggggctctagaagctgactgcctttgtgtttgccacagcgtgctgggaatcagatgagaaggcgggcccagaccccaccagatactcatctcagccattgttgtcattaaatgactctgaaatgacctttcttacctcagtttcctgtgagctcatagttgtctgcagatgtgaattatgtcattgatctttgctccctctttgcttataaggagtagctgttctgctccatgtttctggaagaggaaagtgatgcacaggtcacttagtaaagcggtccccagcctttttggcaccagggactggttttgtagaagacaatttttccacagatagggtggaggaaatggggagttggtttcgtgatgaaactcttccacctcagatcatcaggcattagattcttattaaggagtggtaacctagatcctttgcatgcacagttcatgatagggtttggctcctgtgagaatgctgctgctgatctgacaggaggcagagctcaggcagtaatgcttcccatccaccactcacctcctgctgtgtggccggttcctaataggtcacgggccaggaccaataccggtctgtgacctgggggttggggacccctgactcggtgattcagcagttgatttgggatcctctgtctttgttcctcctccctcagcgggaattcacagtgtaactcatttgctaaggttttctgcgttagaaacagaactccttttggactactaggagacatggtcattagaataattatgattcttagtatgactcaacccctttttaatattcagccttatggagggcctctgcctgcggctctttgctcaggcactagggccacaggggtgtaatttctatctctgccctcaggaagctcacaaacaagtcaagagacaggaaaacggatcctgtttttctaatgggatttgaatggatgtatttatgggaggggggtgctttgtacacctgcaaaacagaacaccagccctcccttctcctctggggttgctgtgagaatcagttagaataatgtgcatgaaccccgtatggaaaatacaaactcataattaaatctaagaaatttttgtggggggacacaaatgttggggttgtctttgttctcaggtcccctcaactggtctaatgaaggaaacagacacctttccagtaacaatagccaacatttattggacacttatgtaccagactgtgctatttatgacatacattatctaatttcacaatcagaagaatgctagagatagggtcaggcgttatctctgtttacagatgaggaaagcaaggcttggagagaatgccatacagttattagtgtggcggagccggcctttgcacctggctgttgaccacgccctagcattaaaccattacctcacactgcttctccgagatagttatcttcttgggatcatttaggtgtggcaggatctggagggagcagttggacccaagtctcctagcagcagcctacacgtttcttgagtctgttttgaaacaacttccttagccctagctgcgcagaaagcatcctcccctcagagtgatgatttttatcatgtggtttccttcctcctgcctttggaggtcaggtcttctcacccagggtcagaaagcccatcagttgctgataagctgcagcacttgagtcacagggtgcaggcctgtgtttagaatgggtcatgctcatgtcaggcacgtggggaatcagtgatcccatgagagctcgatcagtgcagtctggtttggaattgcaggtcacacccttccaccactttgctcatgtgtctactgatgcctgtgatgtagttagttaaaccactgacttctttctcctgcatcaaacatgactttttgaaaaagtgtgtgggggctttccagcatgaaccaggcataaaccaggtaccttcatgaacatattatttatcccttcagtcaccctgtgtgctaggtggtatcataactgctttgtggattgaggaacctgaggaccagaaagatgacttgaggtggcagcctcatttagccagcaagtaagaaaatgggtgatggtgaacttctgcagcaagagggggccgttttcaacatttctgtgaattcaaggcgtgtgcttcgtctaaataggtggagacacgtaggaaggcatagtgtatacatccatcagcacatgggtagattttgaggttttttttgttttgttttaaatccagagcgttgtgtatttgatcattcttggagattcagccacattcacaggtgttaagtgtcacacctaacctagcaatacaatacacagctgaaagaaaccagtcaggttttcccaatatcaatttctttttattttcttttctgcaactccagaggattcaataatgtcaatttctgataaagcttttgctattgatgagtaaattcttccattaaaaagataacagtctgctaatttgcttatcattgatgttgcaagagcgtaacattggagggatgagtaatgcatctgcatatctcgaaggacaaaactgacgtccacccacttgtggatacggtatttggtaaaagtaactaaggtaaaattgcctaagggcatttaacttgagccatagcttaaattcaggtgatattgagcgttgacatatcaggattcttttgtacacagagacgtggatgtagacccactggtagcaattgcaaaggctctggatttttagctgctggatgaaatacctgcagctgaacatctgttatgatgcaattaagcagtgactcagtggcgtgaaggctcagtttcgatgtatcgggaactcctttgaatctgtccacaaacttctcaaccaaaaggagaggagaaatgtgtacagacatttgagaggctgggtctcaacatgcctctgcctaggcagtcatgggaacctggtcttttctcctgagacaggaattaacctgtagtacgagaaacatggttggatgagtggttaaagcagggcccagactttggtacagtttaggttatggtagcagggatagggagagaggtggatgatggtaatggtctgtgtttttttccttttgtcactcagatccagctttttttttttttttttgagagacagtctggctgtgtctcccaggctggagtgcaatggtgcgatctcggctcactgcaacctctgcctcctgggttcaagcgtttctcctgcctcagcctccccagtagctgggattacgggtgcctgccaccactcccggctaatgtttgtattttagtagagacagggttttaccatgttggccaggctagtcttaaactcctaacctcaggtgatccacccacctcggcctcccaaagtgttgggattacaggtgtgagccaccgcgcccggccttcagctcttctttctgctattgctttggcctaattaataacttaaagctggaacgttgatgtcaggtatgtgtaggtccaggaaaacagctgttggctctgttacttcaattttttttttactctatactttgaagaagtagtactttctagaacttgtactcaaaactcaactgacaaatcctggaaggccgttgcttatacgctctagttgatgcgccacagctgcctggctgtgagaatggagtagcatgtacctcttaattagccaagaataagtgccgtggaagaaggcaggatgactttttagaacccatttttagcttgaagatcactgagggagccatcaaatccatccacctgttcaatcaatattcagccagcaagtgggtgtcaaggtgagcagcttacagtgctgagcacactggaaacacaggtgtgtaagggacagccacggtctcaaattacattctgaaagggaatactaggtaagtgatcccaaacatgcaaatatcattccttggtcctgggatgtgggggaagcattttggaggaattgacattgattgcaagtttttaaatatgacctggattagattatgagatgatgggtgcttgggggtaggggtgtacagagggagtcatgaaaccatggaggatgttggggaatggctagaattctacttgggacatcatgcaagttttttttccccttccatttcatttgttaatgcttattattagttgggggttttgcctcctttttgttagccaacagccagctaatcttggcacaggtcccgggaatcaggtgctgcttagcagctgatgttggttaaatgaccttggacaagtgacttgcatttcagttctctaacctgttagggttgtagattgtctgatacagatttgaaggcccctgcaaataaatgcatggccgtttactctggtcactttcattttaccgaatgtgctcccccaaggctcttctgggtagatgcccactgccaaaacattaagcatttttggcttctcatgctttgagctcacaaaatcagtcctgtgggaaacctaacaagctacaaaggagagggaaagcaaaagaaaaggtatatggattctcatgcaaagagagaaggaaagtaggtccctacctaaagtctagccctgtattggtggtggtactgataatggtaatagccaccaaaacttcttgatactccccttgtgcaggcattgtcctaagtactttgcagtattgattcatatgctcctcatagcgtccttgtgtgatgtgttatttccattttgaagatgaggaaactgaggcacaaaggaagctgtgcccaaggacacttaactagtaaatggagccaggattccaacccacgcagtgcgctttgggactcaatttttaaccatcttgctgtgctgcctgttgagcatttttcacctggtgcttttgtagatcccacattaggattttgttaggaccctgggcaaccttgatttagtgaaagcagttgttgagaggtagaaattcctgatccttttttcaatcttaaaggatttgctgagactctcactcttcattggtgatggtaacaaggagcagcatggtgaatgccatgtaaaattcaagccttgccttatcttggaggactttattcccttttctttgatggtactttggagattccagactataaaggactcagctgacagtacagactctcttgatctgtattttcccagtatatgaaattatttgtaatgtacccgtgagaacctggaataaactgtactggcactgaagtagaatcttggatttaaaagtacagtgttcactgctgcatcgttgagcatttgctacacagagaataaccttggagcaatgttcaaaggtgatggcattacccagaaacatggagttaggccaggaaaccacatctgaagttcagattattggagattgctgatttttcttgactttaaatattttcgactggttgagtgtttgttggtgtttttgggctaagtgttagccttttgttctgtgatgtccctgtgtgaataaaatggataatccctgtttccggttagctgctgctgctgctgctgctgccaagtataagtgaagacttccagctgcgatttgcattgtgttttcaggccaccttttgagtttccccatagcagatataaaaactgtttctaagagttcatccttacgtgttcagccttacttgtatcctaaaaccacaaacttgattttgttcccattcattatgatctatatttggcatcagtgaggcaagttatttatatttattatttataccctgcccacttccagaaatgatttaatttggcctaggcaagtgtcttctgatggggtgtgtgtgtgtgtgtgtgtgtgtgtgtgatgataattctgatgtgtgtgtgtatgatgctacttctgccacttcaagagtccagaatcataagattcctaataggattgttgggttggtgaatgctgggtttgttctcttctatgccctctctgtccaggagaaatctgagtatctttcttaggaatgcctaacactgctagactgaaaggtgccatgtcaccatttttcccaagaaattttcttttgagggtgctatagagaagccctctggtatgaatgtattaggctggtgcaaaagtaattgtggcttttgcaattaaaagtaatgacaaaactacaattacttctgcaccaacctaatatatattatatattcccattttgttcttttcagaataaagcttcctaggagtttctctagctcatgacctcttttacctttactttcagttgcagtgttcttagctcatagaaggagctttgacggcacatagaatgaagtataacagcttccgtttgacctgaggcatccctcaggtatgagaatgtcacccagagatcgaatacagtgccaggttatcaactaccattttttgggactgattctctgctcatgtgtgaccattatttggggaaatcatacagtaccacaaaccagaagtttctgaaaacacctaaactccccatctttcacactcacccatagggaccgtggcccccaatgaggggtagttcgtctctgtattggtagcattagcgcacgtgctatatagctctcttaatacctgaactgtggacagaccagatcctcactgagctgaagcacattggcatattaagggagcccagcattgctgtttggccctgcttttgaactgggaagatatattgctgcatggagttctgaaaagtacctttgtaagtcccgagaactcctgttgacctttggatttaggtaaaatgtaagtcttaggagaattgatgagaatgtaggaaccagttttagccaatgcattaagactaaaatgactctattgtttgtcaggctttgccagaaagtatagtgagagagagagatcctaaaactctgaaagcaaatagcccacagcagttaactgtattgactttggaaacaggttataaacccaaacctctgtgctgaacttgaatgggtgtttcttctctcctttctgagggtaaaagctgctggtgagaacggctctctggtgttgctaggacagacctgtatgaccttctttatgtaaataattaacaggggaatattttcatttacgttaaagccatatatgagagagatttccgggctggctctgacagcctctggccccactggagaaggaagccagcactgaaaaaattcaagcttccggccacacggaacctgagaatattctctatgacagcagtggctgtgaagctgtttctttaaagtaaaaccccttttgaaggttagtctggggtgactttactgttacatagggagtagattttgtttcttgatggttcgttgagtggtagagaggttaaaggtagaactaacatatgtagaactaaaaagcatctgaaacttttagcaaaccagtaatatttagaggcttctgcccactctgggtaggcatttttatcttgtatacccataccagcttttcacatcctgtttcttgagaatacataaagagcacatttctccacattatcaggaaaacaatttgaagcacaggtcttgtgaattgggaagaccactagtattgccattagctgcttatttgtgtgtgtgttggaggatggattataatccaagtgtattcatattctcacactttaaccaaaaaaaaaaaaaaatctccaaaatcttctctcttgcattgtttattgatagaatgggaaacttactgctggtaactagttaattctgaaagggttagggtttctactgtatacttccaaaagtacaggcctgggggagccaatatgagagacacacataaccaaaaatttgtaaaaactttattttttaataaaaattataaataaaaattataggccgggtgcactagctcatccctgtaattccagcattttgggaggctgaggcggactgatcacttgaggtcaggagtttgaaaccagcctgggcaacatgttgaaaccctgtctctactaaaaatacaaaaattagccatgcatagtggcacacacgtgtaatcccagctacttgggtggctgaggcacgagagtcgcttgagtccgggtggtggaggttgcagtgagccacgatcacgccactgcactccagcctgggcaaaagagcaagacttagtcttaaaaaaaaagaaaaaatatataaatatatacacacacactttatatatttttatatataatctcatacaacatgttttgaaatacacgtgcattgtggaatggctatattgaaagctaatacataacaaatttaatgataatacaagtgtagaatggacaacaaaggggttgtgcataatcatcaagtacttctcattagtaaaaacccttttcatttgcttagaattgaggaggaggggatgctctaaattgaggattctccatagggtcgtccgtgagacacaagatgttgactgtcccacttacccaggacatgggtatccttttgatgctgacagcatttgctgctgctttccagggaatcatggctgacattgaacttccactgcctctgggctgctttgctcactcctcctaggcaggcaagccgacccttgggaagctcagcatttagccttcatgctttggtttctttgccctttttttttttttttttttttttgaaacttttatttgctctgggaccactttgaggttgaaggtacagcccacagtttaagaaaactgtcccaaacctgagctaataaacaagagtaaaagcctttttctcttgtcattactacttcctcctcactgactaattagccagctgctgcaggtctcattaaacttcattaatcctaagcatctgtctgtaggaactgcctcaagataaaaagaggaagctccgctaaacatttttgttgctgctgctaattaccacaagctatgctttttattaattaatggctctacttgcctccaaatcctactgaagaactttgcgagacaacaggcacttcattcttctgtagctgcagacatgctgctctgtggtttggtgcatggggtacctgtaaattatcagcaccgagaatacgctagctctggaaaccaaggtagagaaaaaaatacatctggaagtctggttatgtgtaacttgaacttgctcaaagccttcagctgacactgatgctttttaaaaacatggcagtgataaattatttcatcactttgctcaaatacattaatgcaaaacattacaaaactagttttcttgactcagcttccagggtctaagaaagcattttattggggggttgtgatgccagagcataagggatgttaaaggtgacacttaaaaaggaaggtgtcgatcttggttctggtctggtggtgcctgagagcagggactccttgaaggtgcaagatgaattacactcctcccaggtgtcaggcaggggagagaagcaccctccatttagaaatatggaggattagccaggcatagtggcgggcgcctgtagtcccagctactctggaggctgaggcaggagaatggcgtgaatccaggaggcggagcttgcagtgagccgagatcatgccactgcactccagcctgggtgacagagcaagactccgtctcaaaaaaaaaaaaaaaaagaaatatggaggattctttctgatgagggcttctgcactgaattacgtaaaactcccatttcggaattatcaggaattaaggtggcaggataccttaagagatttaattcagtgtggtccatttaggttggggggaatcttactgagcattaaggcttgaaccccatttcatatcagttggagccaaaggtccttgctaatgtagaactctctgtagagtggtgggggctatcaagtcaaactgctgggactgtgcttgcttcgtgactgtgggcaaataactgaatttttctaggcttgaatttgctcttatacaaaatatgtttggtggtaagagtacctacttcacagagtagttgtgagaattgagttttaatgaagtgcttagaagagtacctggccctagtaaacactcagtaaaccctgactataggggtggacatggaagaagataatttaattcctccgtcatctaggaccatgctggagcccttcccacttgcgtagctgaagcactggtggatgaacccccatttgcctctgatcttattcctgccgctgcttggtgatgtcccctggactcagttgtcagctctgaagctttgaccccttgactcacctctggtcagttggtcccacagtgctttgcttgatcctctctgttgccatctgttcccatgcggtataattacctgttaataaggctggtgtcagtaaactgtaaactctttctgcttctgcgtctatccttatttcctactgcttagtagagcaatttaaaacctttttaagaatggatttgcatttcctgtagatgaaacctgaggtggaaccccagtaaatcaagggtatgaaatgggagcttttctgaccaaagtgtaggtgagaagatacctggaggctgaccctgggctttgctctttctgcatcccttgctaggaacatggtttgaaaactactcccctggcatcctgtagaccccagtgtttcttcagtgaatgtcactttttaaaaattaatatccttagtgtctccatctattacaaggaagtattaatgtttgtttgccgtattatgcttacaaatgttatataaagttaactaccaatttagtatgccccagaagaaagacatgaaaattcagggtggcattttattttagcatattcattgaaggcagcagtacacataggaccttttgtgatgccccagaagagtatgttttcctccagtgagtgctctttttattcctactcatcagtcccagacccatcgggtgaacctcaattctcttatcaaataaaaaatcatttcatattttcccctttaatgggaacgctctttaaatttttcaaaattaatatgtgctcctaaaaaaacaaaaacagaaaaccagcagtgtattcatagaaatacagaagtggaaatgcctcctgtctgcttctactcccttgagagaagacggttaatagtttggaagatatccttcgatatctttttatgcagttacttacatttaaacatatacattcgtaggatcatactgaatattatacactgttctataagggactcttgcattcagtaatattatatggccactttccgaagcctgtatgctgtaggttttccttactctttttaatgcatacatattattttataaggatgtcccgtattttaattattcaacctattaatgtatatttagtttctagtcttttctgttttgctgttgctattctttttgacaattattttttaaatctgtagtgcacattctgtacatcttcgttttcttgcacaaatatttctagaaaacaaatatctatagatgtgattagtagatggaggaaatacatactataaattttgatatcactacttaccttctcaccaaccacatgtgagtgtcctagtttctccacaccttcagtaggtgaaaggatttgtctttcaaatgttgtatagaatagggttatagtttattttcccctacttccacctagtcctgaaagtggatcctctgctatctgccaccccagcagaacatctataagtttccagcccttcccacccagatccaagattattatctttatggaggctgttgagaagcagccaaggtcattattaaacaataaaatgcccctgaagaacaaatcagcaagagcaagaagcttcctaggctatgtcaaggtagctgaacaataagactacacctaagacaatattggcttactgtctccctccttacacccaaactgacaaaactacaaacagccaggtccccacacctgttggaagcacctgactttttggagtgggagataaaggcttgcgtgtagggacaagggagaggtggggtgggaggcttgcaagtggatgcattcatggatgttataaagatctgtattccgttttatgggaagagatttacatttaagtttagcaacactgcaagaggtttacatttccaaaattaatagaacaacagaaaaatcagatctccccatttatgccctcttgttcaaaactttcctttttcatttgaagaaaattaaatttagacagatgaccagttttaagcttagaagattcaatatgaccaagaccatacattgtcttgtataaaagtgtgtttaaagctttggttagtgttcctataatgcaaaataggttttgatttaaagtaacaacacagaatactcttgtgttctatgaactgtcaactgccctgccctcttctgatgagtgtgagggatcttatggtgctaccctgcctgttggctagtcatcttggggttgaatctgaggtcattttttcctccagtttttctgtcctcctctattaaaacaaggcaatgtacattgggtacttacaggatttgtccaccaaaactctgtagtatttggctttgaaagaaatcttgtataaccattttatgtgtgaggttgaggaaagccacaaaggaaattagcagaagtgtttttcagtgtttgaccctatgtgtaataactttctcttttacatgttaagatatctttaaaataattgaatggtagctgagtatcaattgtctaatgctgtgagctctcatggagtcagaaattactccttacatttttaaagagagaactcttaatgcttttagatgtccttcccagtgtccttatattagttactcgataaatggttgctgtggactaatccaagatgaaaaaatgacaggcgacctttatggctgaatgttgggtattagtgttctgcctggaataatttttcaggcagtggaatagttggctgagttgaaaatataaccgtggattgggtcagcctatcattcaataaattacttcctgaatgaagaatactctgtgagaagtgaaattttgagttacacattgggatatgatatcacttagaaaatagtgctaaactttaaaattctttagtttcagaattttctaaatcagggaggggcttgtcagtataaaattatacattttgttttttgatcttgtcacagttgttcgtgacttctgaaatccaagtgtggtttggagacgactttaccccactcctccccaaacacacattggtagtccgtggcttacttgcgtagacaactgtgattgtggagtttggcactcgaattgagacagtcgtatttaatttatcaatctgtcgtttcaaccctgaacttttctacaatgggttatggtcactggccaaaaagggtttaggtgactcatgtgtaatgttcttcagaacagaagccaatttttaaatccttttgtatttatgttcatttatttttaaatataattcctcttctcattaagtggaatcttgtcataattctatagtttcaagtgataacttggcattgctgtggctttctttattccaaaatgctaatcctttgcagataaatttatacattctgtatagtctgatttggaggacttctgtatcttagcttatcttagatgggagcttccataattcattcagggattagtcagtgctatactgtgcatgcatagtagacagctctgtgtggtggctttaagtcttttgactccccctctttctggtctttgtgtctttctggtttaaaagaaaaaatatccctcagaccttagctttttggattcaatgaattactgttaactttgacatcctcattaaataggagagctgtcggaaactgtcaagaacggctggaattggtactgttatcttgttggcgacgtcagcttctgtgggcatctgtgcaaaaacattgaggtagagcagaatcctcttctatcttgaatgtctgaaaataatgtgactggtgtgtttgaaagagttctatttttccctctttgcccttaattattttggccttaaggattccggaaacctggagtagattgaaaaccataataagcaagggccggggagcatgttatttgattttttaataaactacctctgactagcttacacgccccgtagaacattaaggctactttttgtgtatattgcatgaaataagaaacatcacaaatttgaattctctctcaatacctctgctttatccaaggctcctacaacaaaagcctacctttagcccttgaaaatgaagtagaggattttatctttactggtgaatttgtgtgccacatggtagactagtatagaatgtaatatttactgcttctttaatgttccttaggaagaatatcacacagacatctcccttctccatatgttgcaattatactactttcatgaagtcttgagtgtgcctgttacggttggtgcgctttaaaacattcttttctacttagtctgtattcgtgttaacgttctgccattctgtgttaagttctgccgttctgtgttgtttagtaattaagtgtatggtatctatttagttctaagtttttcctaacttttaagggcattgcaagttaccctcagcccaccttggattgaagtccccttccatggaggactggaggagaagaggtgatggtgtatgaagtgtccatcaaaataagagctgaagagccttcagcttgtggggagggctggaaagttggaagatcaggcctcaagctgttccacccttctcatcctttgaaggtgagggtgcagccttgaggtctagcctgtggtgattaccatagtttgtccctcctgccaaatggggtggcacactccatcccgtaagtgaaggtaaccagataaatacccactccgctggggagtggaaggggccccgagttcaccctgtgactgacctgacatgtggatatcacttaccagaaaatgcttgtggctactgagcattaacctggcaacatattcaatagcaaaatttaaaatagtacccagtgtggtgccttgctcatagcaagcacttagtacctatttgctaagctgattttaatttgaagtggagtctaacaaatgggatgtgggatcaacagtattattatattgaaatgttttaaaccaggacatgccaaactttttctataaaggaccagataataactgttaggctttgtgggccacatggagtctctatggggtatcatcagcctcctccccttcctcttcctcctccttttaaccaccctcttaaaatgtaaaacctgtgtgtctcccaggctacataaaaagaggctactggctgaagtttgctgactcctattttatattaatcttttaactcagtctgaaggaactgaccagacatggatggttatgagttttttcttcttgttttggggaggtgatgtcttgttttcctcaggcagtgtgggatggtggttggaactaaatagataccatcccacactccctgtgtgggatggagtgcctcaggtgctttgggattctgtagggttcagataaatgtgggctctaattctgggtgtttatttgctagcagcatgccctcggggggatcccaaaaccagtctgtgcctcagccacctcagttagttagaaatcacaggctgtaatgaaggagggaaagtgagtgaagatcctaatgcagcatcactagtgcacacctgggcttacttcagcctttgccctaactgatcagtcaccctgactgcagttcccatcctgtagagatggagagtagcaggttaatgggctcaggatatgacttcctgtatgtgaaagcagtttggaagcatgctacccatttttagtcaaacacagtgaacagttactgagaattttatcacaaggtcctaattctgtttttttacatttgctttttccacctggttttggcaccttacactattggttttttttgttttgttttttaaaaaatatttttaacttttgtggatacatagtagatgtatatatttatggggtatgtgatgttttaatataggtatgtgatgcttaataatcacatcgtggagaatgggatatccatcccctcaagcatttatcttttgtgttacaaacaatccaattatactcttagttatctttaaatgtacaattaacttattattgattaattcacactggttcccaccttagctctcatcttagaagaggtagttgtgttgctttgcctcttattttcggagaaagcccccatcataacctcagctccctccagagtcttggcttcttatggattgtgactttatgcggctcaccttgacgtacgactgtgacagaggcaggaccctggtgacagagcctcatttctcagttattgtgggtctcctctcagaagttgtgcctgcagtgccttggtctccacattggcaaactggggttgtgccgctcagaagaaaggccctctggaagctgcaggagggactgcccagcagatgcaacctgtaggtgccaggtcatagagagctcatggtgggttttgtagtcggcccatcagacagttactagcagacaattgcatatttgcttcacatgcatttagagcaaatatttacatgtgttttgtccatgatgcaagttaaacagttaaggaaactattgtaactcaaattctatttttatacaaatcagcaaacatgaatttaaggccttcagactagtccgtcacagggaggacttcagtcaaaagattagtttccttcctgttgctgcctcaagataacagttggattctctgttatcaatacagccagctgcctgtttccggcttcctgctctgtgtattttgcatgttactcatgggaaatgatttatttattttttcaagctaaggcatatagggggactccaccctaccactattcttttgttttgagttaagatccttttttattctttattttaaaacagttcaagaattaaactttaatatataaattgttaaagttgcaacaaattaagtcttgtgacaattgacctgattgggtcatgtttaaataatgttgtaatatgttacaatgatgtcctaatcacaccgttgtgtattttgcaacttcactttaccgtacaggtatgtggtggcaattgcccaaagataaaacaagcaaacaaaaaacagaatttgtcaaacattttagtttggctctggacccattttagtctgaatgacagcaccacaaaattgcatttttatccgtatttcagacattgaggaattgcaagaagcagttcacctgtcatatatttttagtgctatacaatgacaacatttaactgcctagggcctgtctttgtgatatgaaatttccctcctcaacaatttcagtgagaccaccaccaacaataagatttatcgagaacctagttgttggacactggaggtttgctgactcattgaacaaatgtttattgtgcacctcctttatgtcatgtatatgctaaagctctaaacatgaataggattgagcctttgcctctgagccaactgcaagttaattgaagagataggacacaagacgtataataaaagatgagagaccacatcccatcaaatgatgattgctgacatctgataggagagggcctcttggtagaactaatcttggctggatcttaaaggaagggtaagagaaaactgccttctaggttagaagaatgatagaagcaaagatgggaaaaagcagtgtgcaaggtgagagttcagagcatgagagtaagacctgttaggttggaacaaaagacggcatgtcagggaagttcccagatgaagctgatgccttaggagagcccgtttgggacctttaaatgccaggttcagagatttggactgtcttctggatagctggggtccgttgaaggttttggtgcagtgctgcaactttgaaaaaccactgattgaggaacatggctatggtagtgatgtttaaggtggattagaatgcggagagaggcccaaggcaggggagttcagttggggtctgaaaccacccaaattgtggtgagctttgttcaaaacacgcaaaaatagattgtcaaaattattctcttagcaactgatcttgtacttctttgtaatgtctttttgttattttttaactttttattttgtatccccagctagatttctagttcattgagggtaagagactttatcttagacacagagttctaggtaaagtatgcactttgtaatattggagctcactaatactctcaatttcagattagtcagctaacacagtattattgatttaaatagtggggatatgttcatgggatgattgcttcctccccttttgatttcttcttaacttccatccctgtaattcctttctttcttactttgaacccaagactacacctaacttaactatatgtctgtgcaaagcaaaaactacatgattgctgtctcttacttagggggtaggccattatcttagcacaattgaagagcctgatagaaaatattactgggttatacgtgcaggttcagactacttgaaaagtaaaagaaagattccttctcttaagccaggtataaattcagtctttaggggaacaatgaatagggtcttttgacagttcctgattctatgtttccttttttttccatccggagatgttccatgccttcaggctttccttcattcctggctcccatccctttccataaccagaactgtggcatatggtgaatatagttgtgtttagcactctgtgctgagggtattgcagaaagatgccgtacaatcatttccatcatgcagtgcccttctgctcatcaaagctatttctgtatcctaacttgactcacgctaacacagtgttcattttttcagttatagcaaattctctagagtaaataaatatggggctgggtgcagtggcccacacctgtaattcactttgggaggctaaggtgggaggatcactggagaccaggagtttgaggtcagcctgggcaatctaatgagaccctatttctacaaaaaaaaatgaaaaagccaggtgtgatggtgcatgcctgtaatcctagttactctggaggttgaggtgggaagattgcttcagcccaggagtccaaaattacagtgagctgtgatcacaccactacactctagctggggtgacagactccttctctaatatattcattggttaattaatttaaaaatataaattaaaaaattacatagacgcattacagcctttcagtatttatcacagtcattccctaaaaagaaaagaagtagatgttatgcttctagaagaggatgatggtggagaggatattcacagcccttttttttaaccattaagcaaatgtgtttctcagttctaaatatttcatacttttttttttcttttttctttttttttatctgagacagagttttgctcctgttgcccaggctggagtgcaaaggcaccaccttggctcaccgcaacctctgcctcccgggttcaaacgattctcctgcctcagcctcccgagtagctgggattacagacatgcgccaccacgcctggctaattttgtgtttttagtagagatgggggtttctccatgttagtcagactggtctcaaactacttctgacctcaggtattccacctgccttggcctcccaaagtgctgggaattacaggtgtgagccaacgcgcccagctacctcatcctttttttctaatacatcttctaagaatttcaagttgtttatcagaaaccaaacaacaaaagatagtgaatctcagtatatgacaggagaaggtgtagctatgcatcttaatccctcttgcctggctggagtgggagagaaagagccgaggacctcaccactactggctggtgacacttagcagcccttaacctcactgagccttgggctttgctagagataactctagcatcccacctacctaatagtttgctgtgaagatctagtgagcttagagaaagtatgaagtgccattcagatgcatggcaatgttattgcagacacaccatcttataaaattccatctggaggaaggagcaccatactaggatttcccttataatttactccttctgggaatcagaatctgatgtaaatgccactcacttgagggtgggtttcttgtctcagtagttctcattgacagtagttagctaatttacttatctctgagcctgtggaactaaaggctgagctggttgggtcttcacactcagaaccatttctggttcctaggttctcggggctccaaggtcattttggtagaatttgtggtcctgagaagcttattttgagaccattgttaggagcccttctttctgtctcccacccctgtcatgtcacagagacagcctcaccacgttcctcccacggagggctgctggttctttttgtccttttttcactttgttttccactttcctccctggactgccagagctgcagctgcctcgagtcctgggttgtgttggtaggtaagtgatgtccaggctgcctagaggtggggtcctcaggtgtgatcttggatcccacttgtaccacattgtacagcattgcaaagaggggatggtgagaagtgtttgaacctgagggcctttacatggagaagtgaggagacctattctgcatactctgaaggtggtgcaagccatagtgggccacagagacaggtctagtcttgatggagacaccatcccaacagatggagagttacccaataatgcagcagaccctttacaaaataaggacttgcgttagttaggatggtgagatggtgggtaattctaagtcttgtatcatggaaacactttttttttttttttttttttttttttgagacagagtcttaacgctgtcgcccaggctggagtgcggtggcatgatcttggctcactgcaacctccgcctcccaggttcaagtagttctcctgcctcagcctcctgagtagctgggttacaggtgcgtgccaccatgcccggctaatttttgtatttttagtagagacggggtttcaccatgttggtcaggctggtcttgaactcctgacctcatgatccgcccacctcggcctcccaaagctgggattataggtgtgagccactgtgtctggcagaaacacttttttaaatgttgtgcgtgaggcattattgcatagtggatgagaaccagggctctggagccagcctgcctggagagttgctggctcctgcctcatggggcagttgtggggattgattataagtgcagttagccctctgtatctgcaggttcctcatttgtggattcagctgacaacagaacgaaaatatttgaaaaaaaaattaacaatacaatagaatacaaataagatgcaatatagcagctgtttacacaatatttacattgtattagttatgaataatctagagatgatctaaagtatacaggaagatgtatgttggttataggcaaatactatataccatgctatataagggacttgagcataaggagtttggtttctgagggaggtcctggaacaaattccccgtagatactgggattagatacggaaggacgactgtgcctgggacatagtaagtgctcagtgaatgctataattatattttaataaaaaagaaaaaaagtcattttctttccatacaactattaaacaaccttctgccacacacacataatttcctcatattctgggatttttaaatagctggcccaggtgttgaagaagggattttttgaaagagaagtgatttacataacttctaaatcttgttcagtcctgagattttacgattccatgaccctctggtaagtttcttttttttttttttttttgagacagagtttcgctcttgttgccaaggctggagtgcaatggcacaatctcggctcactgcaacctttttctcctgggttcaagtgattctcctgcctcagcctcacaagtagctgggattagaggcatgtgccaccacacctggctaattttgtatttttagtagagacagagtttcaccatgttggtcaggctggtctcaaactcctgacctcaggagatccacctctcagcctcccaaagtgctgggattacaggcatgagccactgcacctggccaatttcttaaatgatttgaattagtgagactatttctttgctggagaaaagacggaactaatttagagcagttacaacactctgggcactttgatgtgcactttacctcctcttgtttggtgctgggcagtctttagatgagtccttataatacgtaagcttagtaaactgcgggagggtgggggcaaatatagctgagagatacccccagagggcaggggcacagaagtgcttgttccttggaggcaccacttaccaagtttggggcagggctggttgggaacctactgaaaggtttagctgcgtcagcttcttggggaggacttgataacagcgatacaaggcccagaaaaggtaaacggagaatggaaatggtgtgaggcacagaagtgcccacctcacatcgcccagacccagcccgccccagctccatgctgctggtgctgctgctcctctgccttgcaaagggcgtgcccttggtggcgtgagtgggcctgaaggccggccatttctgctgccttcgagctgacctgcaggtcatcaaagagaatgatgaaagaatagcaacccaccttggaggggtgctctctggggagtgtcttccaagatttctcaacctagcaccgctgatattttgggccagataattgtttgttatgggagccatcctgtgtaccgcaggatgttaagcagcatcctgggcctctaccctctaaatgccagtagcatctacccatgaatcgtgaccatcaacactgtatgtagacattgccaaactgctaaatgtgccgaggaatcaaaattgcccctgctggagaaccttgggtctaaataaccaaaccagtatggagcttgtaagtgctacctttttgtacctttttgtaccttttgtaccgtggttgtaagaagcaaccacggttgcttcatgctcataggcctggaagtcggctcactgccctctgctgccccaacacctcctcacgcagctagccccagtcacagcagcttgagcttggaagcactcctggattgcctttcatcgtcagtgccaagggcctcctgctcctcctcagactgtctggcccatatccccaagccttgctgggtggggagtgcaggggtgatgtcattgtgccttcccaggataggtggaacaaaggagggagtccccaaggacccgaagcctgatcctctactgagccaccaaatagatttcttttcccctctgtctccctccttccaacttcataagcatttgctgttctccaagtgctccattgtaagaggacacgctagttgactggggctttgtgtgtctctgttgagtccgtttcctgcccctcgtgtgttatgagggtgttgattctggtctggtccccggatggaatcttctgtgtcttttccaacgtgggggtgtgaacctgaggaacttagaccctgcgtgatttttccagcactcttgcacttcgtggggcctgctcctgactgtgaggagagttcgaagggaggggaacaggaagagagggcaggaacacaagagcttgtttttttatttttgacatctcttcctcctcttctttcctcccacctactttgagtttctaagaaccatgatagccctggggagccctcccggcacagatctcagtctgtttcagctctgttctctgcacccacccatgacctctccatttgcctctctgtagggaggagggttgggattgggctgtaactctttaggacagggcactaaggaagtatattgactgttgtttctggcaaatcctcagagtttccttgtgaaagaacctgttaattcaaaacctgaaagaagtctgggtgctcctttagtgagagattcacccaaaagagtgacaattggctgaggaacacattttgtgcttgtttatttagaaatattttaatccaagcaggttttcattttgatcttgctcccttgcttcattaaagacattttctgactccagtataacgcataaaggattttataattcacaaaaaaaattgttaaccctaaatacatataaactatgagttacttgcctccttgataagaggccatctgtgaaatgcaccttacatattctgctctagacctgctctttcagaatggccaagcttagccccagaattacagctcctgagtcactgtagtaaagttgccatccatcacaatgattacgtgatcaataatgcatgtggtcttttctgtgggacctgtcatgatgttattggtgcagctgcttctccactgcagcctgccccttactgtctttttctgcttcctctaatcctgtcctttttgatcctgtgtttctggttggcctttgtccctggggaagggccctccttctgtctggatgggtaggtcctttttgggaaaggcaggacctcaaggagccgctgactgtagcaggtggccggggatcttggcaggtgccccagctgattctcctgccaggtcggcagctgtaaaacctcaaccaatgtcatctctgcctcattccctccctgtggtgggtggtggagtgagtttagcaaagccttcagacagaccttcccagggtgttgggctgtttgctgtccttctggccaacctgagaacccagtactctcaggcgactgggcacatgccttattagcaagggtggctttttagttgttacccccacccagtggttttgaaatacatgccaaattgttgagctatctgctttttttttttttttttttttttgtagattcgtgtgtaattatttttgtcatttgggtttgcactaggagtaggtcttagatttttggcataaattcatgctggtggaactagatatagtgtatgtaacatagagaacagagtcagggagtaagagtggttgggtccagggtacgttctgtggatgtctgttgaaggtcttcagcaacctatgtttagaacattctgcagaggcaagaagtttgaaagcctatttgtatggtatgtgaaggccagttctgggcaaatatgtctagagttttataccttaaattggacagaatttgattactgagctttgaaaaacctttaacactgtttcctggatgacttgaatgtacaacaatcacgctttagaccataaatcagcagttgccttttcagcgaaggatcacagtatggagattatatttttcttctccttttatagaagagaacattgaatcctgtgttgagtcacatttttgttgaaaccttgggcccagaccctgctttcccgatgcctgcaaagacttcccgatgcctgcgatgtctttgcactctaccatgttgcttgccattttcttttgttgttcatggtgtgtgtgactgagcaggtgaagacggtcattgccaaggtcatgagttaatttatcttgtccagtgttgcccaatcctttgtagatgagggaagcagttttctgctgtctcatgagatttcctaccctacaccctttaatatactcaccttttggaggaataatagctgtaacatgtatgtaggaagctttaccagtcaagtattatggtatagggcaggactgcaaaggaccctgttgtcatctgcatcctgctgcctcttcagcagggatgggagaaaagaaaggggagcaaaggatgttctgctggcagtgtgcctgggagctcacatgtttaaggactggacagttcctacacagatgctccttgacttatgagattatatcccagtaaacccatcgtaaagtcaaaaaattgtaagttgaaccatcagtaatcagtgttctttctcaaagacatgaccgcagttaaggggcgctaagtagaggtgtccttggaggtcagttttgctgaccttcctctggctggggtcttgtggccctgctagcatgtgcctgctcctgccagttctgtggtcaatggtaaaacaagttcttctctgcttgcagatgagcgtgaagccgtgcagaagaagaccttcaccaagtgggtcaattcccaccttgcccgtgtgtcctgccggatcacagacctgtacactgaccttcgagatggacggatgctcatcaagctgctggaggtcctctctggagagaggctggtgagtggagaccttaggaagtgccgtgtgttgtaggtggaaaatatttttgaaaaatcaagtgtgacttgtctcctgttgaattctgcacttaatggttgatagttttgaggagaatcttgagaagtgagttgagcgcttcagggagagccttagtgtcacattctgagcgtggatgatgttcttgagctgtaataaagccactttgttctggtaatttgcaaggttgccacctttggtcagaaagaacttggctggggttcctgccaagaacagggcatggtgctggaatttgaagggccaggcttgggcgctggcttctagatgaacctgtgtcccacatgcgatgatggaatgttttctaaatttgtgtctttctggttgtctagaaaatctgagctgccatcttaaggtggcaagcattgaattcagtggccactgatgttttcttccctgcacgctttttattttgggagtggagggagaagctggtgttttgtcatctccttgggaaaggagcttctgatgaattcaccctgccttttcaggcaggaaagttgtcagcctgcaatgaaaattgtatccccaatctgtttcccagagctgctgcggccctctctgatgtgactcttgtttatgcaccttataccaaagaagcttaaagcagtcactgtgactgatccaacaggttttgtctcaccttggtttgaaaatggttgctgtatcctcccagagcacatgtagtgccataggtggaagtggtgccgagccagaagccaacgcccagaatggagaccacatctgtactgacatcaccaggaaaatatgatgctggcagttggcagggctgccagaaagccttatttttaacttgatctccaccctgtagcttgccagccgcagtaggcctgtgtgcagacctgccccacacctctgaccgcaggcaagggtctaaggttgtcccttgtcctatttgttatcagctcagagacagactgcctctttgagtctgggttgaaatggagccagaaaagtattctcttccctgcccttcagttcaagaacagggctctccagaagatagtgaagccctgtcttctctgtagtgagtttcatccatgccctttgttcctgagcatgtaggtcttgtggcctcattttctgtgagggtttgtcggtcacactagacaaactagacaaataacggagacccctgctcaaaaccatgatggctataagaaggcagttgatttgtggtctgggggtgagggagtggacccacatggggagtttgaacaggccatttattgcattttgatttgattttccaaagtgagtcttgtttgagagcctagactagaattattgtgatatgcagctttaagtataatttttataaccagacttcctttgtctacctctcaacctttttttgtttcttagtgtttaacctagtatgtttatttattgattttttttttttttttgtggagtgggggaatggtgttttgaaagtagctaaaaaaaatcattaaaggtcacatggataggagttagtctgaacatttatttttgtggttttttttttttaatttatttttgttccaatagggtccaatcttctaggctgtagggagtaaactgttcacctttaaagacccataattattttataccaagaagattgtgtccttgataatgtccacatcataaatgggatcaggcccattgccgttttttctgaacagggcaagaaaaatataagtagggagaaaaaccagtaaagcataattcttagatgtgtgtgagtatctcccactcctctccttatttgttagcagtaagtttttttgtggcaacccagagacctaggagagtaaggatgaagaagatggtacagtggctaccatctccaacctcttaggcagtcgatatcagtagttttacagaactttgtaaagcccctagtgccttcatttgtattacccattcttcacagccatcttggattatataggttggccagtctaattttcttattccaaaaataaagataccatagatagagtgctcttaaagctcttgttcatctgggctggagattttaagtctctttggcctcgtagtctgtttggttcatggaacttcctggaaaggaaacacaccacacactgcctttggccgtggaggttgccaggacctcaagttaaagatcctccctgcagaagacctccatgagagcttgccccaaaggttccttgcatattcagattccagaactaatgaggtggttagagcttccaggcctgggtaaatgaatgtcccagctaagtgtgtcatcagataacattagctgggctttctgcaccagtggtccaaaaccctgggtaacataaatgtttgcactctatctggagcccagtctttgtcagccagcattttagccccagcacttaaccaccagcttggcaatagctagcagataaatgtttgagggactaggtgattcaatttacttaattaatagattcttagagccacttcctttacagaggaggaaatctgtgaatgtgtgcatgtgtgttttctgagtaaagttcaaagaaacattaatgacccagacaattccaccctcaccccaccctggattttggctcaataatatttgagttaaatatgagcaagtatcatgtaggcatttgggaacttgattttgaactactcagcaacatcacaaggcagagatctctggtcctggcctggttatgatctgtgtccagaagtgtctgctccctctcggtctcaggtgtatcagctcatagagcagtgagaaggctgagagctgggccaggaagcttctgctagtcaggattagattgattagaaataaaactattcttttctcatttcttattctgagttcactatagtctataactctccataaaggtctcacttgaaaaatgccttagaaatacagacccaccctttactttaacattggattggcagataaaagtgtgagcacagaacctgtgctggccacttagtaattagacctagatctcaggaccagagtagaatgaggcttgaggggtgatggtttgccctgcagcagcgttgacatgtggagagagaggagcccctggcatacgataggcctgcacttcaatggtaatgttctgcccacagctcataatccactttagatgctccccattgcctgccatctcccttcatgggcgtctgcagtgaagattgattctcactatggtggccagttttttgccttgctcctggccagactaagccctcgcctctgaccgagatagagtgaggttttccaaacaactctgccctcccccaaaccccaccaagtcagttatcactggtttttgcttccctgttgtttcctgatctgtattctgtcttcttactccatcagtcattctctgagaaagcaacagaaaagagtgtgtgtgtgcgtgcatgtgtgtgtgtttgtgtatgttgccaccattaatttcaaagcaggctgagctaggtggagaagatagatttaacatgagatttgttaagcctcaaatcccacgttgaactgctctgagttttttcataaagcctttgtttaagagaaccatactggtacatattgtttattgaaatagtgtttgtggactggccatggaacctcgttggggtttcttaaaaacgtcatttgtatgggagaatttacttttgttttaaacaaccagccacagaactcctacattaaatgtgggtctaatcacacaaacttgagaagtgaactaagagtcctaagtgccacatgataaagtgccagatgaatggccccagagccctagagttcagaaggggagatgagccctctggacaggatgtcaagaaaccttagtaggagggtagggtgtgggtagggttccagctgggtccaggagaagagcttcacaggccgggcagccagagtgtgaaagctcatagtttggactaagtgaagagagcatttggaggtagcaggcatcaggaactggcgcagggcaagtttcccagccaaactggaggggttttttttgaaaggagtggtgatggtaacttccctatcacttgtgtttacagagtactctcctactcttttctcattcagttcttacagtctaatgaagtgggcaacctctgctttacagaaaacagttaccagtgacttgccaaggccagtgctgctagtaggcgatatggtgtggactgcagcccaccctgctgactcttcagcgcctcctttcccatggagcccttaggagtgggtcccagctgggaacaagacaggcaggaagtcatgggacacagtgtggtattccccgattaattgtaattgggccaaaataactaatactcctctgaaagctcaaagtttcatgtgttgggaggagtttggggactagtgtgaagtgagtttggctttgtagcatattagaagaaattttggaattagtgcttcccatcctaccctatgtattccgtagaggcctttgtttgtgaatgtgtatagcaaaaatctatgtttaattaaaagaaaaaaacataagcaagtgcctgtcacactgatttgctgagatcagtgtcttctgtatttcctcttcacctgaacaagagattggcagacactgtagacttcagctttggtgctagtgagtcctctgtcctgcaacaccctgtagattgttatcatacagctgtaagtgacttcagtgaccaccaagttaaatcccctcacttggtagatatggtaagtcagggaaaataagtgaccagcaaggccacccagctgggttatggcagatctaggcctcattggcctctctcagtgcccggggctgtgctctgcccagcaccacaacccttgatagttgtcactccaggtagctgcagggtttctttggacacgtatagagaaagaaggggcagggagtacagggtggaacagggcatcgcagcaccccagagacctcccaaaacaccctgccagaaaccttcccttatatcttcctctcctataaaaaaaagaggccaaattagctctcagaagctttttttttctttctttctttcttttcctctccatctctggagtgacaaaacctttgcggttgtaattactccatagttctgcaaatcctgatgccttgcagagtgtaaatgacccaaactcaaggctgggcaggcaggtgggacagagccagtgccccaggagggatcacccagccccctccttcctctctaagggtttttggtccatgcgaaggaattgcccaaggccatactgcttcttaggcagggcctggactggactctaataagcaattagaattatgttgtcagatcctagagatgtttatgtagccccttaagtttcctctcctgttttagagcgagaaagaagatgggcctgggatggagatatggctggtaaaggtttaggactagacgggaccttgggagggggaaacagaaaaagtgcctgtgaaaaaaacacaggaatccacggactgtagtgtgaggggaagggaagcttcttaaaatgatttaaaggaggatcagtaaaaataggcatttcctcagaggaactgctctctgcctgcagagccccgatagtcacaggagtctggtatcgacccttggccccacgttaagggcgtttcagactttcctgtcagaagtgacacagaagtgcacatgttgctgtggggacggaagcatgccgcactagggaatccgatggccaataatggaggcaagacagaggacgcttctttcctttgcagaattagctgctcttggggcaggcttcagaaagtgtttactgctgagaggcgccccctccctctgctccattgtgtttaattctctattgttacctcttcttccttttgagaagatgaagtttggcaatataaaaatagctctttaaaaaaatgaaaaccagccaccagatgggaaccgagtccctcacttcctttcacatggaagcatgtacccctcttccctgtattctgggtttttcctgtactgtaaagaggacgagctttaagtcctggttcaccacatcctaactagctggtagattgcttcatctctctgagccactgtgtcttcatgtataaaatgacaggaatagtaattattataatgcagggttactgtgaggattagatgtgatcacagttgtcaaccacctagcagggagaggtgaacacacagtagttgctcagtaagtggcagctatgaatttttagatcttgggaactttgaagtttgtatgaccaacatgtttctatggatagctctgtgagatcatgatcacctcttgaaattaatttcttgtaattactgcttcctaaacttgcccaggtattgtgctttaaaacatgtgagaagcctactctgaagcagatagaacacacgttgtgggagtgtgtggtgtacttgagttttagtctcaattcccactcctctcgtatagtaccaccaggaggtcatctcaccttgctgtatcttgtttattcttgttattctgtggcttgctggtttttgagttgcatccaggtctggaatgaaccatcccttagttcatctggcacagccagtcgccatcagcatggggtccctgtgatgtggcattgaacttcttcaacctgcgtgaatgtgtttgggccccatcaccaccctccccctcccacaccctggaccccatgttcatgtggaagcacacacacattccattgagatttgtagagagagaatagagttgtggaatgtctcatacatgtttcctgtttgtggggaggagattctgagaggaccactttttctaccgcattcatttgaatgtaagtcagacaagtgattatttgagatcaagctttcaggataaagtctgaaagaacattggttatgtcctgctggttggagcctgggaaggtaccgacagtccccatctattcattattctcttccttaacttctcataataccatccacactgtcgcctccaccctcttggagggagacttatgagaatggctgctgcagttagaagtttctgtcccccttgatctgcagttcccatcatgaagacactttgtttgtgatggaaacagcacatgtagctggaccactcactatctcactgctcaggtgcacgaactgacaagaaatgagaagaaaaggcccctgaacagcaaaaatgtcagaagcccctgcacctttcttagaggcagttaatccccatccctcaaatttgaacagttttgaaccaggagcttcgttcaatccagaaaccacctggatgtgagaagaaaaggggctgctgtgaatagtcacgtttcagcatgagaaatgatagctgatccaggagacaaaaggaaaaacttaaagagcacacatgagagccatatgcagttctgtgactgctggcggggagagctgctccacccacctcttctagggcggcaccgattacacaggcatccctttctcggataggagcgtaatggtgtctgggccagctttaggaggctgacgggtgtaccgtggagagagagcaccagtgttacctcaaacagcacttgcagaatcagagttacagaattttagattaagcccacccgtattttatatctattttttcctacctcgttagattgcttgattttgatgcaacctggcattgcacaaatagcaaattctagcatttcccacataaccgaattaaaatcattttgaagtttctaaaggcaaaatccacctctttctttttttggggtaaggaggatatcacattaatgtgaaaagcttaatgtttaaagacatttctttttccattgctattatggtctggttctgcatctgcagatttaactgactgcaggtagaaaatattcaaggggaagaacaatgaaaaataacaatacagaaataaacagtgatacaattttttaaaaatacagtataacaactatttacataccatttatattgtattagttacaaataatatagccatgatttaaaatatatgggaggccggggggctggctcacgcctgtaatcccagcactttgggaggccaaggtggatggatcatttgagatcaggagttcaagaccagcttggccaacatggtgaaacgccatctctactaaaaatacaaaaattagccaggcgtggtgactggtgcctataaccccgctacttgggaggctgaggcaggagaatctcttgaacccaggaggcagagattgcggtgagatcgtgccattgcactccagcctgggcgacagagcgagactctgtctcaaaaaaaaaattaataaattaatttttaaagtagatgggaggatgtgcataggttatatcaaatactgtgccgttttatataagcgacttgagcatttatggattttggtatcattgggggtcctggaatcaatcccctgtggataccaagggacaaatatatttgaaaataaaatttttctacttgtggtaggcctctgcacataatcttatttcctcaaggtcaaccacattcttctgtttttacttgtccttttttataggagaaaagaaagtgaaaaataataatctgagactggacagacttaaaatggccgcttgttacccaagtaaccttcctttcagacgttttccgtacagcacatagctgaggatcttaactacccaggggaagagcagggaatggacaagatactaaggtagggctggctgctgcccttaattgcgtgtacctgggttgctgcagcctggccccctttcccctgtgaggtccgctcagcacacaccaagcccagtctgtctgctggcattcagttcactgtgcacataactctgtgctcagaactggaccaaaaacccctgagaatatagaagtataaagcctcatccttgctcttaggaagcgaacagtctagttggaagtaataagagcaataaatgaaacaacagcaaaattataatgatgagttcctgggctctgtggtccagcctgttagttgtagagttgtgaggaaaagaagagctgtgagaaccagaatgattggaaatgggaatgtctccgggaaggaaagatgggccttggcctgagccttggaaggtaggtaggtgtgatgaggtgaagagattgggaagtcaagatgatgggtcacaggctgagtgcgttcttctacatgtggatgtgtgcatcctcctggcatctttatgagatggtgacatcagctccaggtgcagcctctactagagggggagtgatgggaaataggaaggagagaaggatggagccagatgggcgagggcatgagcttggtgttggtacaacagataatagaaacccattttgtgtgcgtgtgtgtgcatgcgcgcacgagtgcgcgcatgcacacacacagtggatccttgaacaaagcagggggtttaggggcaccaaccccatgccgctgaaaatcttcctatgcatttgattcccccaaaacttttaatagcctactgttgtcttatcaataatataaacagtcaattaacatattttgcatgttatgtgtattacattactgtagtcttaaagtaagctagggaaaagaaaatgttagaaaaggaagagaaaatatatttgcagattcattaagtggaagtggatcatcataaatgtcttcatccttgtcttcacgttgagtaggctgaggaggaaggtggggggattggtcttgccatcttggtgtagtagaagtggaggaggtagaaggggaggcagaagaggcagggacacttggtgtaactttatggaaataacacaagcagtcttgaataattggaacccttggaacaaattcaatttgttttctggtactgcttttacatcctcttccgcatcatttgtcatctttttggagacactcattttcatcaagtcgtcttccgttaattcttctgatgtggtgtctgatagctcttgaatttctccaagatccgtatcatgaaaaccttcacccctctacctttttgccatatccacaacctctttcataatttccttcattggctctgtcataaattctgtgaagtcctgtgtaacatctggacatcattttcttcagcaggaatgtattgtttcaggctcgatggctttcacagctttttctgtaacaatgatggcatcttcagtggtgtagtcctcccagattttcctgatgttctctctgttggggattctattccatagcatcaacaaatctttccatagagttttgtgtagtaatgagcgttacaagtccttatgaccccttgatctagaggctgaattagggatgttgtgtttaggggccagtagaccatgtcagtgccttcagtgttgaactcatggggttctgggtgggggcattatccaataccaaaagaactttaaaacgcagcctcttactggcaaggtactttgagacttcaggaaccaaaacatcagtagaaccaattcagaaaaccggttgtcattgtccaggccttctttttgtacaaccagaagactggcagctggtatttattttttcccttcaaggctcaaaggttagcagccttatgaataagggcagtcctgattataaacccagctgcatttgcacagaacagtagagttagcctatccctttatgccttaagtcctggtgctcacctctctttctcttactgggcttttgtgaacagggcactttcgtctgcattaaaaacttgttgaggcaagatacacttttccttcattgattttcttaatggtgcctgggaactcatctgctgcctcttggtcagcaaaagctgcttctcccaattccttgacattttttaagccaaacctctttccgaaattatcagactgggagctctgtgaacctttcctggttctgagggctacccaattaaaaattaatagtcatgccatcctttgctggtgttacattctccagccttagatccttcaccttcctatgcctttaaattgtcatatgatgacttcattttttctcaaatcatattagtccttaggtatgcctctcttatggcaatcctgcactcacataaaagatgcatttttaattaattcattatttatttatttattttgtagagacgggtttttgccatgttgtccaggctggtctcaaactcctgggcacaagcagtctgcccgcctcagcctcccaaagtgctgggattacaggcatgagctgctgcacccagccaaacgctgcattttcaatatgagataaaaagatatttcacaaaaaagtgcaaggtctttgcatctgctggtgtagcttcagggatggcttcacaaatttccttttctttttttagtcttcaaatggtgggccaccacaactgtagacctcaatctacaatacatagcaagcagttcatccttttcttgtaatgtcatgacttctctctgcttcttgggagtacttccagcatcactagtggcactttgggtctcatgatattagtcaaggtttacagtattgcactagacactgtgaaaaatacacaagaactgtgagagatggctttttactgtgatacccaatttactagagagaccacgtggagatgattagcatcataggcattttaagtaggcactcaacaatacttgagctcatcacagtaggagttagagatggctctgaaattactatagtagtacagtacataccaagatttaatactgctcaaatggtgccattacaatctgtgtttgtgtgtatgagttttgataatttttaattttatgacagatttgtatatattttgcggtagtaaattataaaatagactaacatctatatatattttatgcattcatgacatacctttttcttaatttttctggtatttctaggctaggccattcatctgaatcttttcaaattgtcaccaatctctaaaaagttttccagtttatttattgaaaaatatccatgtataagtgcatttgaatagttcaggcccaactaaaggtcaactgtgtatatttactatatttttatagtagatgtgtgtgtgcttttacaggagacgtatatatacttctataatagtatattttatagtagatgtatatatacacatatgcattatctactctctctctatatatatattttttgtttgtttgttttatttaaaatgttcaccttccaagggcctcttttacgttttgataaaactgggtagagggaagaaacatttggggtatttaaattgcactacactcatttttttcccttttccccttcttttcagtaagttatacttctttacttaaccttcaccccatccctccacacacaaccaccacttggaaattcttctgatttgatggttgtgttccctgttttcattttgagccaagcttaagggttgccagcaggtggcaaacctaattttacattccaagtaatcagaaaatcctcacaggtgttttgtcatgcacctgcaaaaaaaaaaaattgtatggatggcagcagtagcgctgaaattctccatgaaaattggattctctcttccctgaacttaaacaaatgctcatttgtaaactatatagctccacaactattctctaaagaggaatcagttatcatccccttaagtaaactttttttctgtggccgttaggtaaataccgtccttggacttaatgagtacatgtgtttgttaatgttctgctctgagcgggagagcattgcatgaatgggcacatgtgactaggcagtaactcggggttcatctctactctgttgggtgatgtgtctctacctctgctctcctgtttctagcctaaacccaccaagggacgaatgcgcatccactgcttagagaatgtggacaaggcccttcagttcctgaaggagcagagagtccatcttgagaacatggggtcccatgacatcgtggatggaaaccaccggctgacccttggcctcatctggaccatcatcctgcgcttccaggtaagggtctctgcccagggttgctcagaacttaggccgacctctcaggtatgagcattgttatagagctggcctccctgtatcagagggatcgggaagaccaggttgaaagcatgtctcagagtcatgtgtgtcatatccagccctcagaattgaatgctgcctcgtaggcacgtggaagctactacatcctcctgcaattgtactagccctggtaatcttagctttcctgtcagacacatctcagcggcccaggggcttctaggctgcatcccagcccgccactttgctggcacctgctctaaacatctggtctctgctgcttggctctcaggagcaaaggtataaggacgtggccaatgctaggttattagcttagactgcctcaacttcactcaactatgacatgtgttacagaacattttttggcaaagctgttgagggttatggcatgtgtgtgggctccattttcaccttctcattctctttggatgtgaggaagcagtttgcaggaggaaagtacaaaactcttgtgtttctttgaattgatgatgctttatgggttttgttatacttgaggaggaaggctctaagtatagaagtattttaagccggaaggtactctcaaggtcattttgtccacttctttcactttatgaagaaatcggggacccacagaaatttgaaaccttgcctctgatgacacagccagccagggctatagtgggtgcctctgaccccttaagagagagcgctcagccttttgggactgtgcaccaccacgagcctgattattggttctttctccaggctcatgcttcgtactcatgcgttccaattaaaattggaaaggcaggaacaactttgtaccatagtgtcaggtttctctgcgaacaaatattctaacagtcctgtctcctcagtgactgtgttctcttgccattccttcctgttctgcccctttaataaagatctgttttgatttttctgggtaaacaaaaacctcacacaaaaaggaaaaacgaaaaatcaaattataacttgctttgttttcttattgaaactctgaaatcagcctgtcaacagtcccttttccttctcacttgccctacgattgggcttcagttagtgtcgtgattatatatgtgggaagaaggggtaggggactagaatgagttacaggaagaaatatcttcctgcctggctggttcccaagctggctgatcatctgatgcctttgggaaacccttttaataattcaggttcccagggcccagccctagtagttctgattaagtaggtctgaagagagaaccactgttgaagatggtacaacatcattaaaggagttaattacagcaatcaaggacatttttccccagatagaactcttacatttctgttatttagttcctgaatgatttgaaaatggagtagccattgaatccactaattactgctcttgtgtcttatggcaacagaggtgaaattattagcagtacactcctctagcttcaccccagttttatggagtaaaatgttgtatttctgttagctttggcctgcaataatcagagcgtggaaggccatcctgactgtgggctatcttgacagcgggtcagcacccaggtcagggagctggcacacacagcccttttcaggattctcagcgtgaattgctttgagtcattgactaattcgcttcctgccagtttgcatattcctataattcaacttgtaaatgctgatgtgtattttctccctttctgttgaggtgagaggcataggctgctgatgttaccgcgtggcctgcagtgttgttgtcttaaatgactcagctttctccagcagctttattaaaacattacctattctacaaaaataatatgattatgaatcagccaaggcccagctgtagatatccagcatatctataaggatactccacatatccttgtagatacatagggtcaagcttccctgtgtacctacaacggtctctccttccaccagctcctgaatatacggttttacaagttcccagtgtgtgtgtatgtgtgtgtgtgcgtgcgtgtgctctcattgctaccaggatatggcctaccctatatgtgcatagaagtgtccattaaatactgatgatgacacagattttatgatgctgcccctttaaaagagagtataagggccaggtgcggtggctcatgcctgtaatcccagcactttgggaggccaaggtgggtggatcacttcagatcaggagttcgggaccaacctggccaacatgacgataccctgcctctactaaaaatacaaaaattagccaggtgtggtggcagacacctatgatcccagttacttgagaagctgaggcaggagaatcgcttgaatatgggaggcggagattgcagtgagccgagatcacaccaccgcactccagcctgggcgacagagactgtctcaaaaaaaaaaaaaagtaaaagatggtgagaaactggagtggaagtctctaagtttgcctagtttaaatagggagctgtcttcatttcagaagggtaggctttgtttccatatgggcaaatctggaaacagatacccttcacacagaagtataagaaagccaatgggttaatgtgtgtaaagttgcagcctgactttcctggtgagcctgtctctcaccccttgagtgagggttgttcttccacattccctttctgcacttgagctaatgatcctaatattagagactggggtttatacagactcaggcttcaccttcttaacacaattaaaaatagagaatttttttttaatgtagttgtttcaattcccaggtgtttttcctagttgaaagtttctaactttttaatcctgtatttatatattttgtcttcattttctctgtttttcaaaaagaattctgggaagtgtttgtagattgaatggagtgaaggtagtggggagcatgacagagcagcgaagcttaaaatggctacagctggaggcaatggatggactcctggccagcaccatccactcctgactccattccacattttactctacaagaggaaactttcatataatagacaaaagtgtatttggagcatttgtctaaaattacgtagctggcagttggcgcctaatctaaaaactaacattcacagacccttattacgagctctgcactttattatatcatttaagtgcataacagtgctgtgagattagccactgtcattatttccattcctcagatggggaagctggggaacctgcccaagggtacatggtaggtgatggagcctggattcacatccaggcagtctgactttggtgccagccgaccaggctttgtgtataatgttgcaaatatgctgcctctgagcggcttatgaaggcacaccatggaagcacagcgtttaagcccacacttgctctaatagtttggaaatggtgcacacagtgccctcatcaatgaaggttgcacgtggtgtgaaaaatgtttacttacaaaaaaaccgaactcagtatttttctgggggtctggtgagattccagatgcactgtatgaacccctgtgctagattctcactggaaagatgggttgtctcaggggtaaaaatgacctctgataggtgctgggaagtcccgtcagccttctgtctgtgtgacatagaaaatgtagttttcgttgtgtttctgaagtgagcccagacttcaggaagcagttttcattgacagggtagatcgtctgcagggcaaggctatgatctacagtttattctttatgtatatgcagacctgttcttcagtggttcttttaggcagctgacccatctatttgtctaatatttctttgtaaatcttagatccaggatatcagtgtggaaactgaagacaacaaagagaagaaatctgccaaggatgcattgctgttgtggtgccagatgaagacagctgggtgagtgtgaatgaagagggtattggggctgcttcttccaggactgaattccactgcagtcatcacttagaaggtgttgacaggtatcttttccactgcttccattgggaagtcttgttaactcgcaagcagttgatatgacttttcaattagctctcagaatgaaaggagctctaatttatattttagacctgtcatgtcttcataatcagtttccttctctttattaaggaagctccagagagcattatattttgaatttgaaaaccctggaagcatgcttaggaatcatatccatgatattttaagaatacagttgtaggttttcttcaccctttaatttctgttttggggagctttctttgcacagtaaacaacagcataaccttttaatattatctgtgtcagtttcccttttattttttcattgaaatttcagtgaagttgtttttagagaaccacatcttttttgttgcttactattgttaggactcaactgatgctaagccttcgagttcttagcaaattggtttaaggtcataggtacttactgagacccaattttaggttaattagatttactgtcagaactactttaggtgtagatgtaactctaatgaacattaattcagaatatgaaaatcagaactccatccattctgagagctagctgaaaagtcatcatgtctataaagagcttatggcctaataaaagggtcaagtcaggtatgaacctttaatcagctactgatataaagttattaatagtcaatatggtatagaatagctgattcattatgggtaagtttcacacataaatttttcagggaggtactacttttacaaacttcatccaattaagtggcgtatggaagaaagaaagctgagtgtcacttgaacagatagtcccaccacttcttgtcccaaagtaacgtgtgacaagggactgcaggtcctggtgtctttgtaggtagagtagaaagccaatggaagcagaggcctcagaggtgtctaggttgtcgtcactttttcctaagtaagagtagtgttttaaatctacgacacagttcacatcttttgtgagactgaattaccaagcaagaaaagccacatggatgcatgttttatttttattttatggcaggctcgagttgacggattatttgttctgacttgattgtccttagtgatattcactgctttaggttttacaatgcttacagactttttattaacaaagcacttggcaaaagtataaacctccatgtggtaattgtgttgcttttcccttctgctttgtccttggcaggtaccccaatgtcaacattcacaatttcaccactagctggagggacggcatggccttcaatgcactgatacacaaacaccggtaagtccatacaaatcatcctagcaatcgtggggtaaaaggttgctgtccttccatagcagatttgggtgacttttccatatccgttggcttaactgtctcaccgtggtggaaatttctgcattccatgtgaggaaaatatgggagaatatataaattcttccaaacagaataaacaggttctcccttaatcttttttttcttaattaactttgaagtgtttattcaaaaatcaggtttcattgtttgatgattccatgatagtatattttagagttttactccactaattggtgattttaacctttttggagtaacagtcatgtttcattagtcatatttcttttcaagccatgatttttgttgtgtcccactgttgttctgcacaggcctgacctgatagattttgacaaactaaagaaatctaacgcacactacaacctgcagaatgcatttaatctggcagaacagcacctcggcctcactaaactgttggaccccgaaggtagggactcaagggattacaggtgggatttttagcatctgtaccatccaggtgttaatgtaaaatctgttttgtgtcagtctgtttcatttgggagttatcaaaggaagagcttaattttggttatgggaattttttgaggatttatggaaaggatgacactcaaaaaggccttgaaagatgaatacgatttaaacagagtctgaaggagagcgtgtgcgggcagagctactagcatgtgcaaaggtgcagaaccaggaaagaagaaggtatgcttgagggctaacaattcaatgggaatggtgtttagggtaatagcagggaataccactattcccttctgttagtggatgggatccccataggggcaacaggcaacagggagtcattgaaggttcttagcagctgtgctcgaagtagaaaagtagaaaacctggcataggctgttaatgaatacttgttggctgacatttatctgaaggtggcaagcaggttggatggggatgggtggagattgcaggcaggggccttgttaggaggctgtgctttgcttatgagcaagtaagagtttaaatgaggaaggcacctttgggaaaggggagtgtaggggtggaaggagcagcagtcatagtcctttcttacagctgcatcccattatctgcacggaactaatccctctttactctgtgagtccctgtgtaacttggagctgacctgtttggagcagttccccaggttgtagttcccttgcttaataaaatcctaattctgggtttcatttcaacatgagctctcataggaactttttctaattttgagaagcatttaaaatatctggatttgtttgaagtgctggagatatatagatcctctcagctgtgaacaaatattagagaggaaaaaaactgtgtgtatgtgagtgaaagtttaaagttcttttaaatatagaacaggaagtttaactccccaaaggcagatcaaggtcatgaggctgccaggcaggcttcttgctattttccaatgcatcagattcactgatatgttggctacaggaagctgagataaaattatctttgtactaacccattaaatggtttctcaatataaacagaaaactaaaattccttgggcttcgataaatcttcatgcttaacccctatcttactatgggaaggaatttttccttagccctagttctttgtgctttgataaagaacctttttttccctatcgcagtgacaacattttttaataacttgctcattagttaatctttcaatcaccgcccagtatgaaaagggggattgatgttccccagatcacaagacgaggagctaaaaatggcagctgatttcacttttatcctgtgggtttgatcttgattattagttgtccagggctccaaagaacatcagttaaaatctacttgtagacaagttaaataaaaagttttaccttctcacttctttgagttttgttgacattttgtgttgattaaattgtatacctacactggcattttttctggctgtcctccagttcactctcctttgtgcacactttgacgggctgagcggacacaggagccctggggtagggaacagtagctgtgattctggccctcacaaccacgggctgccttagtgaccctgggcagggagcatgccagcagtgtgtcctgatgttctcttgtttaaattaagagaaacaattttgctccatacaaggctgtcaggggcggcgataggaatgggggtgtatgtatgaatgtatattgaaaaagagcctgataatatctgttaagagctgtcctttgtgttctcttcacaacctatcccaagttgagtgcttactcaatattgccgaacttcaaagacttgccattttaagttgtttgttccttctctcagtacctatttattgaccacctgctttgcgcaggacagcacagcgggaatgtggtaggtggagtggcataggggcttgcccggacaggcttctgcccttggggactgaattttgtaaggcaaacaaaacatgcataaaaaatcataacctggcaaaaagtggactatgtgtccatacaaagccccaagggaatagaggagggagacaataatgtcagctgtggggatcataaatggttgtattgggtggtaacttttgaaatggaccttgatggatagtaagaaagttatggggtcatgaaggccatttcagacaaagggaagtcataagttaaggaaggcgtattggaaattatgtgtgtatagggaatggtgaggtcaagtttgattcagagatacagtgctaggtacagtggctctcatctgcaatttcacctccttaggaggctgaggtgagaggattgcttgagcccaggagtttgaggctgcagtgagctataatcatgtcacggcattctagcctgggtgacagagtgagaccctgtctcaaaaaatttagtaaggaatacagtgtttgagaggtagtaggctatagaatttagaaatgtctagaccaatgcttgacacttaaaagaagcctggtgaatatttgacaaattgatggaaaaaagggaaggaaagttatagccagattctggaggactgaagcgcttatagtttattcttcagactgagtaattttgagctaggagaaactgtgttcacagctgtgcttctgaaagatcagtctgggtgcactatgtgaaggaaatcgggaaagctggtggagggagccattgtttcagggctggttatgtgacaggatgggtctgaaacatgagtgacaataaggattccataaataagggtcatcccaacttagactcagtgactagctgctggatactggtaacaaagagataaagatatccaaagactgattgacagggggcggtgctggtcctgtaggcagcaatgaggactcaagcagagctaacccagtatggtagtagggcaaggagaggaggaactatgtgtctgtggaaggcgtttcatgaatattcacataatggggaatcagtgagatggtttaaccctcattatccttgtaattaatgcacggatggcagaacactcaggtacaaacatgaagacgctgaactgttccatgttgaccagcagtcgttgcatttgttcctgctacctgggtggggcacagtagcatgcaacacactgaacagagtcttctctgggttacagacatcagcgtggaccatcctgatgagaagtccataatcacttatgtggtgacttattaccactacttctctaagatgaaggccttagctgttgaaggaaaacgaattggaaaggtgagctggtgccaattttgtgagttgtgagacataattaaggttaattgagccctcattctcccatgcactcataaaatttgccaatagcaatttgtagtggactctccggatggtagggaaatcggcagaagcctcttcatcctgaagggtaacaagaggtgggagagatggccaccatatttaggaaaggatctgggggctatctcaaacccagcaacatctttctcctcaactgctccaggaaattgggtattggaaatctgatcgagttgcctaatgtcatgggtgtgacatcctacttaccacagttgaaaaggccccagcatcgtgctttttacttctcatttggctgatgttcacctgccatgttttcaaaacacctcagaccagatgacattgtcctctcaatgcagtgaagtcaaaaattaatgggcatttatgggacaggatcaagctaaattgagccctttttgtttctctagggatttcagatgttaggctacagaaatcattcagaatctctttgcttgggggttggaaagttacagaaccaattacagttaagctgtcattgctcacaaataataatcacagtctgggcccctcttagcagatggttccttgagttaaaatgcttgtgcccaggtacagctgaactgtttcagagctggccaaactgtttcaaagccggtcgttttgtgtgcatgcactcgtatagggttacaatcgtatttaacttatggagtgacatgatcttttcaatttttctatcccttgttgccaggtgcttgacaatgctattgaaacagaaaaaatgattgaaaagtatgaatcacttgcctctgaccttctggaatggattgaacaaaccatcatcattctgaacaatcgcaaatttgccaattcactggtcggggttcaacagcagcttcaggcattcaacacttaccgcactgtggagaaaccacccaagtaagatgcatattgtagtgtgatcattaatatggaaagacacatcactgtagccaacagatccctatgttctgatttctgtaatctcatctcttaactgaatgcctttcagtagtgtgtcctactccttttcatctgactctgttttgctgagatttatgatagatcatgctctctctgagcccttcccaatataaatgtgccactgacatacaggatatatgagaattccaagaaatggtacaagtccccaaccccttatccaaaaccattgtacctagtgtgtttcaggattccataatttttggattttaaaaaaacagcacagctcatatgttgtatattataagaccccagatgggactaaggcaatagcccataagcccagtaagtatctgtagcaaaatgtgtaaatattcacattgcattagataaagaaagataatagataatttcataacagttcagaacaggttttgcaacccaaaaaaagtttgattttttttcatatcttttttaagttcataattgttgaataaggattgtagaccttatctattgcttaccatagttccaaagtcgttttttcttttctgaaaactcagttgcatatatcttggtaaggtctctaaaacccattgaaaattatattaggtagacatttgaaataatccgtgttgaatgcattcagctacactgaatgaatgaagtaagtccattgtccaggatttggggtttaaaccttgatttaagtgaatacaaaagagtattgcatgcctttgacaccctcaaatataaatgtcagcaacaacaaagaaattccacggtttggtatgtttcaaggtttgtaatagccaataagcaacctactgatgtctctttgacatgcatttcatgtaagtcagaccagagttaaatggtttttaaaatgcatgacagtgtgaaatttttttttctccagtaccaaatgaatgttttcccctgtgtttagatttactgagaaggggaacttggaagtgctgctcttcaccattcagagcaagatgagggccaacaaccagaaggtctacatgccccgggaggggaagctcatctctgacatcaacaaggtaaagtggatctggactctgcatgggccctgacctcctggaggcttcaggttctatcactaggtctcgactgctaagaggacaagagactggaaggggctgtccccacctgccgaattgacaattggcagctggtgctcaggtgtggcaaaggaccaagcaagcaatggtaccgggttaggctgctggaggcttcagggggcaatgttagattttatcaaaccagctttggcgtaggctatacaccttgctactcagatacatatcactttacttctcatctgaggcaattgtttcaaacatctttaaattacagaaaggagaaattgaaaccttatttcatgtgtttcatagtagttgtggggcttaggatgttggcttcttgcattagagatgctgtcaaataagcaattttaatcatcatgcctattatgcctgcagttatagaaattcacagcaggcattatttccaactagaaagaaatttgaaaaattctagaactttggtcacttgtacagaactacattcctttatgctgctcattaaaattttttttttaatggaggcagggtctcactatatagcccaggctagtcttgaactcctggcctcaaacagtcctcccacctcggctttcaaagtgctggaattataggcgtgagccactgcgtctggccccacttagattccttcgagtggaaggtttgatttttttttttaggtgaagaaatagatttcctaggaatgaatttaatatggacagtaggtcaggattttgaaagaaatttcagatgtgtaaattttttaaaagtggcccagggtggaatgaatgagaaattcatatgaattcttagaagaatcatttatcttttttatatgatcaaagctatttaagataatttatttcctcttaaagtaagagatttataatttacttatattgcttcatagctacagttttgttttccaagtacaacacagaatctttagatttagatgacggaagagtgttcccatgaggatacactgagagaaaaacccgtttttttcctcaaggcttgagagtcagtgagagtgggaatgggatttcccattcaagctgtcaggtccttttgagaaatattagctgttgactgtaaccacggaagtttccttgaacactgcaggaaactgtgtttgtgtgtgtgtgtattttcatttttgtaggcctgggaaagactggaaaaagcggaacacgaaagagaactggctttgcggaatgagctcataagacaggagaaactggaacagctcgcccgcagatttgatcgcaaggcagctatgagggagacttggctgagcgaaaaccagcgtctggtgtctcaggttctgctcttgacattattaaaaagactgttgctagggtaatctagaaacacagaccatccccaggggcatagggccagaggacagctgcttatcgacattcattattctggaggaacgtcaggtcaccttggccccttcccattaagaggatgtttataatttctaatatacatttctatttatctaacttttcatagatttggaagcagctcaagcagagtttgttttagagccattgagtgtgtgtgaactgttcacatttataagttttaacagtttctctcttttctttaatctttgaccaactaatcctacgaggcagttagactggttgtgaaataaacaaaaatggcttgcttttccacctggcttgacataagctatcacctgctctagcttttcagtaaggtactagatacgaactgggcccttctgcaaaatgagcagttactagtttgctttgaggagggcatctaagctcaaggcagagaccagtggggtgggggactcaggagtcagatttggctttaagaccaccagggattaatgtgtgctcaagatttcatgtctgttctttttccttttttggagggggggtggcgcgggaaataggttttttggttttgtttttgttttgtttttgaggcagagtttcactcttgtcattcaggctggagtgcagtggcgcaatctcggctcactgcaacctctgcttcccaggttcaagcgattttcctgccttagcctaccaagtagctggcattacaggcacgtgccaccacgcccggctaatttttgtatttttagtagagacagggtttcacaatgttggccaggctagtctcgaactcctgacctcaagtgatctgcccgcctcggcctcccaaagtgctgggattacaagcatgagctactgtgcccgggtggattttttattttccttcttttcattccgtttctctgtaggacaactttgggtttgaccttcctgcagttgaggccgccacaaaaaagcacgaggccattgagacagacattgccgcatacgaggagcgtgtgcaggctgtggtagccgtggccagggagctcgaggccgagaattaccacgacatcaagcgcatcacagcgaggaaggacaatgtcatccggctctgggaatacctactggaactgctcagggcccggagacagcggctcgagatgaacctggggctgcagaagatattccaggaaatgctctacattatggactggatggatgaaatgaaggtaaaacctgaccgaaaggaaggacgacagagctgatccaaccagggctctcttttctgtgactcattcactaaacccctacgtacagctgtgtgccttgtctaactgcccacatgtacagctagagaggagccacatcacccatgggaagattgctagctcaggaattaaatgagacgtgaagtgtgaaaaagttgtagagaccagttcagtagccagagctctgtttctgtgacttagatatattccagtgtagggaatcaatcacattgtggttttctttatttttaagttttcagggttaaactaacttaccgtttcattgatctgtgagtgagtggtactactttgggcaggggtcccggagaggtggtatggggagaagggaggagtggtaggtgccatggacagaggagaggtcaggaaccaggcagccagagttctgattgtgagtgcctgagttgcctaatcctctttgagccctctttcttggtctttaaatggagattgtacttactatctacctcatccaattattgcaaggatggaatgcggtagtatgtgcacagatcatgggatgggctggatggcagtggctggtcatgccatttattgactgctcttagcatagagttccaacctttcccccttcccaggaagagacctgctatcatgccatggccctgtacctgttcatgtcctccaatgcaggccatggaatgctcagccatgccaagcagttctccagctgggaggcctttagccttgtagacagaagaaaataggacagttttcagacagtcccatgaagcttcctttgtctcagcacgctgtgttcccaagcttgaccttatgcaagagattcccttcccaggatataagctgtcatctgttgcctacctcttggactgttcctgacagaggggcaaagtcatctgataccatcagttttccctcctattgttccagatttacagtgttcttaggtctggtctctcttgacctctcaaaatagaaatgttcgtaaaatgtagcagagagggacttttcattttataaatcatgatgcacattgtaactcagttggtccagagacttcctcagaagtaagagtgaagtagaaatctcatctggcgaggatgtagaatgaggcccccaaatttcgctggttgatggaagaaacaagaaaatatcagtgggttcaaacttaaactctagaagttgcttggggtctactaagcaagacagccacctgaccctgctctccttattggtttaaagatgtggcttgtaagcttttcaagtagattgttttcccattgattgtgtaagtacagtagaggcataccaataagctcctaacagaggaaaaacattcacttacaggctcagcaacttctaaaagatttctttcaactttgaagtgaccaagtctatcacctttatttatttatttttgagtagttgttgcagcggtttcttcttgaagctccagtttatattttggaatctttcatacagcacccccgcccacgctccccactgccccctcccccccaccctggccccgctggccctcaccatctttttcttctattctgcactttttagtgtagatttgacttacttattccaagtttggtgatccttagtttgtgatagctctcctgactcaggccttcaggtatgatttgttttgttctggtttgttggccatcatcttcccctgaaggtgtggggtccatggcagactagagggaaggcatagcttcattgctggctctctgcttgtcgaaagatgatgtgatgctgaagtcaaggctatagtcacagatgtccttttggttgcttcttgtgcacaggtgctagtattgtctcaagactatggcaaacacttacttggtgtggaagacctgttacagaagcacaccctggttgaagcagacattggcatccaggcagagcgggtgagaggtgtcaatgcctccgcccagaagttcgcaacagacggggaaggtaaggatggcccattccaagcattacctccgggtcaccagagattcatatttatagaaacacagtggggcttttgaagttactgtgccactatacattcctggtgggtttgtcatgggagcatgaaatacggtggagtggccttctgaacactaactccatcttgtttttctggaattgatacatcctttccttaaatacgcaaatgctgcctttgctttgagtggcttggtgtttggcagtgagactttgtcatacctcagtctctctggccatgcaccgacaccctggtgtggctgttccagcagctcctggctttcacagctggttgcatatacctctctttggaggatgtttagaatgatttggttatgcttcgtgtatttctagaaacaattatatgcagctgcctttttcatatgattcaagtgctttcttgcaggaggatgatcactttgtctgcggtttggccaaaaaaaaataatgtttatcattgccctcactcctgttctagtcaagttgttagaaggtgctccattgccttatcgcatggccctgcatttacatttagcagtgagctggtaatcataagaatatggggtgtagcttactgcctgccagtgagcctgcacccatgctgagctccctcacacagccacgttccttccttgatgttaaacaggttacaagccctgtgacccccaggtgatccgagaccgcgtggcccacatggagttctgttatcaagagctttgccagctggcggctgagcgcagggcccgtctggaagagtcccgccgcctctggaagttcttctgggagatggcagaagaggaaggctggatacgggagaaggagaagatcctgtcctcggacgattacgggaaagacctgaccagcgtcatgcgcctgctcagcaagcaccgggcgttcgaggacgagatgagcggccgcagtggccactttgagcaggccatcaaggaaggcgaagacatgatcgcggaggagcacttcgggtcggagaagatccgtgagaggatcatttacatccgggagcagtgggccaacctagagcagctctcggccattcggaagaagcgcctggaggaggcctccctgctgcaccagttccaggcagatgctgatgacattgatgcctggatgctggacatcctcaagattgtctccagcagcgacgtgggccacgatgagtattccacacagtctctggtcaagaaacacaaggacgtggcggaagagatcgccaattacaggcccacccttgacacgctgcacgaacaagccagcgccctcccccaggagcatgccgagtctccagacgtgaggggcaggctgtcgggcatcgaggagcggtataaggaggtggcagagctgacgcggctgcggaagcaggcactccaggacactctggccctgtacaagatgttcagcgaggctgatgcctgtgagctctggatcgacgagaaggagcagtggctcaacaacatgcagatcccagagaagctggaggatctggaggtcatccagcacaggtgagcggggcgctggtcagccactggcctgttccttgtgaccaccagtggcccaggaggtgaccaccctgtcaaattgccatttcagatttgagagcctagaaccagaaatgaacaaccaggcttcccgggttgcagtggtgaaccagattgcacgccagctgatgcacagcggccacccaagtgagaaggaaatcaaagcccagcaggacaaactcaacacaaggtgagcacgtggccagcagtgtgccagcctcccacgtgtgggactggggagggtgaggtcactcatcgagctttgctgttgggaatttcccacatggggtcatcgacattgcaacactgatgtcatggcattggcacctgccttttgacatgtccttgttttgtaagaagtgtctctcagggcaacatcattggttgcaggaggattatctgagtcagcccagcatctgcccctcgccacaccaaagttagggccttggtttgacctgtgtccagtgtagaaggtattaagatgacacctgtgctatccattttatagtaacttcaggaacaggactctagcatgtttaacacttaatttgccaatgaaagtcctgattgtcagggcagacctttgttccagtcttatctttctgttgagtaaacatgtttgagtaggttatggcacctggccccagttttgaaggttaccatcagtcttagatttggaaaacgttcattaggtagagttcagagatgtgtaaaatgtgtcacagacatgaattaattgactctgggaatggatatcttgtaattgctcacattggagctctgtaacacattcctcttcgtgacaggctttttccagattacattgcatccctgagctatttccattatatttggtgttcacagtttgagtgagatgattttccaaaaaagcatgtagtcaaagcacagatggagaaaacagataagcagcattaacccatcactgttccttttgcaatccagccatggtcagtcttccctttttcacactcgctgtctgcccctgcactcacaggtggagccagttcagagaactggttgacaggaagaaggatgccctcctgtctgccctgagcatccagaactaccacctcgagtgcaatgaaaccaaatcctggattcgggaaaagaccaaggtcatcgagtccacccaggacctgggcaatgacctggctggcgtcatggccctgcagcgcaagctgaccggcatggagcgggacttggtggccattgaggcaaagctgagtgacctgcagaaggaggcggagaagctggagtccgagcaccccgaccaggcccaggccatcctgtctcggctggccgagatcagcgacgtgtgggaggagatgaagaccaccctgaaaaaccgagaggcctccctgggagaggccagcaagctgcagcagttcctacgggacttggacgacttccagtcctggctctctaggacccagacagcgatcgcctcggaggacatgccaaacaccctgaccgaggctgagaagctgctcacgcagcacgagaacatcaagaacgagatcgacaactacgaggaggactaccagaagatgagggacatgggcgagatggtcacccaggggcagaccgatgcccagtacatgtttctgcggcagcggctgcaggccctggacactggatggaacgagctccacaagatgtgggagaacagacaaaatctcctatcccagtcacatgcctaccagcagttcctcagagacacgaagcaagccgaagcctttcttaacaaccaggtaaggtttgttcctgcctttgcttcctttcggtgaaagcagccctggctgccttttgaaatgttttggctggggcagctggtttaaaccacacctgtatggaattatatggataatttagagactgatttttttttccccatactcttaaggcattgaaatccatcacgttgtaggggacaggaattgaaagttgccataagagctgctttgccttacaaagtactgtttgatttcaactgccattgaggatctcttatgtgttcatagtatgtcttcataattgaggtattgatccaatttaaaagatacagtgagggccaggcatgatgactcactcctgtaatcccagctcttggggaggctgggacaggagaatcacttgagcccagcaggtcaagggtgaagttagccgtgatcgtgccactgcactccagcctggtggcagggtgagaccctgtctcttaaaaaaaaaaaaaaaaaaaaagtacggtgaggatttttttttttcttgagaccagtctgtcttcttgctctagaagggtcagggacttcacctgaggacacaaagtagagattagagaaataaaaacagctgaggatagtcaccaacttcagggctgttactgtctcaaagagagagtatgaagggtacattgctgttgccttgataggcacgtgagaggacccttgaggctgatacacaaagctttggttcctttcctcactctctttggaaaaaaaaatttagagcattaacccctgagggaaattcggtcagttacagtgtcccactgggtttttttcctcctaacttttaatttgatgtgatttaattatttcatgtaagtgtaatgaagaaagtgttgtgaactatgttgcacggaaatgtagaacacaggaaaatgagatccttcattgatctgctatgatttgttcctctttttaaataaggagtatgttctggctcacactgaaatgcctaccaccttggaaggagctgaagcagcaattaaaaagcaagaggacttcatgaccaccatggacgccaatgaggagaagatcaatgctgtggtggagactggccggaggctggtgagcgatgggaacatcaactcagatcgcatccaggagaaggtggactctattgatgacaggtacagttttctgaggttcttaagggagccttgcaccttggggctctcaaacttctgaatcattggccagaagcccttgggagtttaggtataaatttcccagtgggcagaatatgggtgcccagcagaagttcatctacccatacagaaaattagtgagctgtgcatgactgcctgagaatgtgggtctggtgagacatgtacaagtgtccacaaaaggaaagaaagcctgagaagccaagctaattcttaaccgaggacctgtaagagccgtagtgctgcatcgcgatcaggtgtaagccatgccctttgaggattaacacacgcttgtgtcacctgataggacccctggcgccaggtattcccagccaagcccgtgttccccttcatccatgagaaagaagcctgtcaggagagtgggaagggagggtgaagcttgcttgttctgagtacctggcaaagctacaaaggaacattacctggacttttttagaaaattggcttggatagtgctgtaataggatctttttcatgatggagaggtaaataagagcaaaggttattttcctcttctgccagggcatctccaggattggatacactttcttcatttcttgtttaaaattatttttttatttacgtgtgtgtgtgtgtgtgcgtgtgtgtgtctgtctgtctgtctgaaagatttcctccccggctggaggccagtggactctgtttgaccctaactctttgactcactccttactcttgccttgccccggttacttaagttggaggttggggcagatcaggggttggatgcactagcacaggccagtctgggccagccactggatcaatcactagcccctgttccagtttgggttgaatttaagggcttgctgtgagactgatgtaatcaaaaaacaagcccttcctttctgcctctcttctggccttcaagtgtgttggaaaggaaaaatattcctttgcttaccacatctgagagggtttcctgggacccctggtcaggttgacttaaaataagatgggtggagaggggattactctgtttccaataaagattgagctcctgtctttaccacttccaatctttttttctgagctgattcccaggctgaactatatgttctagggtggtattgtggaatagagaataacttatgttaattataattttgtatctgttgcttttaaaacagctgcaaaaaagaaaaataaatccaccaaaccctccttaaatgagcatgagaaacagcaattgggcaaagcattcataacctagggaaaaagaatttcctttttttgtaatattaactctgagtattttgtaaataagatatcctatgtacttccatgttagatgcacacagctggtttcctgcaggcgggcttggctgttagggatgtgtgcattcaggcaggcatgcagctgccttgctgcttcctcggtttctttttatgtccccagtgctgcaactgcacaaagctgttggaagcagatgatgctgtctagactcctggatatgataaaacgtttcagcagcagcagccctcagttgtggcttaaccttcattttgcccttgaccaagagcctgggctactggtgttccagagcttccttaggattcctcagttttaaaaatgaaacgtaaagataaccctgtactatcaataagcataataaagatggaaggagggagctttccgatgacctgccatcaggagaactacattttcttatttttctccattgatgttaactgaattctgatttcactttaatatccccagaggcccacagaattgaaactgaccctagagggtacttgtcagttatgaaaacacacacatctgtgagttccaggtgctgtaggagcacaaactaagtaaacatctaaaccttcagatataatccccgctcctcgaaacatcctgacactgtggtgaagcgattctcctagaatgtaaagtcattataatgtgcttacgttcaggaagtttcctgagttgttgaaagagtaccagaacaaagacactgactctaacagatgtgggtggggcatgagtggccttcaaagtgcctgtgagtgggaagagactgtcctcagcctgccccaggggatgtgaacagggagggagggagctcctgaccaagagggaaattccagccacagcacagttcatggggagcaaggaacagtatccagcttcataaagcaagaccctgtctcacaccggaaaacaggctcagaagttacccagctgtttcactcaggcacctggggttcttgactattcacagaaaccagaacacccgcatctgcttcatgtgatgagggagcttttttgagtcttattacagggagagaaagtgagagatggaaaagcactctttaagactgtggaaactactccctagttttaaaaggtccttctcaggcccttccctgtaattgaatccgtgatccaacatggagagaatttcctgagtttcacttcccacgaatgatgtccgttgcactagtaaaccattaagccacactcacttcttttaagcgtcttctgagtcagcggcagtcccagatgcctgtgtggctgtgtttcacaccacacgaaggccgttgtcacacctgcgcatagatcggtgtcatttggacatgtgactctaaatccttgcctctttcttcccatcttgatggtcccactataggagaaaggctgcctgggccggtaactgccgggcatgcatgagagttgattatataagaaatacattcaggattctgtatggtcatatttctcccttaatgaatctttccagtgtttgaagttactttcatttctgttatttccgtgagaggcgaggatgtgtgtcctgttgttaatttccagtatctgggattcttccctgccactgtaggacttcaatgagatgccatgccaaagggaatggaatcctttatccctttgactactggcaggactcctgcatttgtcactaaactccaactcatattatctcctttctaaagatttgcgttcttgaactcccctagaaatagaactggaatttgagggaagggaatttccttttgacattcctaacccatccacattcttagatgactaattctttttagcccaaattcactaacaatcttttatttttttaaatttaattttggtttctgatgatagatggcaatggcataaaatgtctctggcctttattattttttgttgttgtaaaagcagtaaatgtctgacattttcaaggggaaaactactgcccttaatcccatctgtagcatatgccatttaagtgtttgctttctaacccatgccttggagttttatatcatttaatatgtataaactattttcatttagcattatagtataattatttttctacgtttgcattttgcctatgtggtataagcatattaagatcccttttcctgatgctatggaactcctttcaacttaaaaaaattaaaaaggcattatttgtgtctaacatatgcctaatgatatttttatttacaataattgtatgtaatactgtaatttacataatataaattatatatgatgttataacatgtaaatatgtataatttctactgttctgtagccactggtacctgcaggagctataggggcagagggcttttccctttgattctccaggcagacaatggctatgacactgcattgtcagcagccactgagggcccgtgtggtgcatgcatctctactctaagatctttctttctcctggggaagtttcttcagacaccggtcagcagcacgtgttcaccaagctgctcttactcagcgtgttggagaatccaaggctatgtgttcttcctcatccctgcctcagggtttggtggatagaggagagaccttgtgcaggcacaggcagagagaaattgctctaagaatcgaatgaaaacccagctctcctcagttgcactctgcctttatccatcttaataccctgaatatagactggctttcttgtttaggcaactcaggagtatcaaggaagtgtatgtgtggcagtgcttttgaatcctcagtgggtcctcccctattggaaatgaagctctccgctattgtagtggagccactggaaggcaatcctttgctaggcattcacgctgctatttctcagtttccagtctctaagccactgggtgcatgaaggaagtttgccaaagagtgctggcaccttcacagcagatggggaaggagccaagtagggagcgagcaccccctttaccttagcgtttaccaaattcagcagctctttccagttcttacaagttatttatttaaggttttgtgttttaacttctttgagctttagttacccttatcaattgattaaaagtgggattgagttagtatatagtcttacaggtctaaaaattttcattcctttttgttgtatttttggtgagtttttttcaagatgagaaactctttatcaggaaacatttgtttaaagccagttacatgattatatatattttcttagccttgtatgtgtcacccagttatgagcttcttgaaaataagtttccacttctcccccggtgcctaaaataaggacttgtacaaagcgtgtgctcatatttttttcttaacaccagattaggaagcaacaaatttgtatagatcatttgacagtatgttcggcctgttgtgtggtttgggcagatttttgggtctctctgggaccatggcttactcctttggaggatgctaaaatctctttatcttgtctccttcacattattgagaactgcaagcaaactctttttagcatagttaggaattcaggaaataaattgatttgtattctgtatttcaagattctctacttccttttttaaaaattatttttgttaccattctaatagacataggaagaatcgtgagacagccagtgaacttttgatgaggttgaaggacaacagggatctacagaaattcctgcaagattgtcaagaggtatgttactctttaatccctctattcctgtgttccagtaatagcaattgccagccagcatttagcacaagagccttttgaattataaaattaatgaaaccagaaatccatagcacccatttgactcgcaggcagggatacgtggcacttcatcagttctccagcctacaaggtacagcttaattagatcattataatctagactattatattaatagtatagtactgcactgttcattacagtagacaccagccacaatgtctttatggttggttggctatttcattttaaattaactataattacataaaactaagagcgtggttcttccatcactagctgtattttaagtgctcagtagccaactttgactagtggctaccatgttggacaacacagatatagaacatttctgtcgtcaaaggaagttgtattggatattgatgtcctagaatattgtgcaacctagaagtatttagtgtcatgctttcactctttaaagcaatgtacatttcaatgatatggaaggaaagaactaaagggaactgaaactggctaccaagtaagaagcagagattttcaaaagacaaattagtttcttattcgcttaagaccttcatctatccatctttcaggctgttcccatgtgtatctaacatgcaaagagcagtaatgctgattccaagcaccaagttttaatgtggcattaatctgatgatcattgtactatttcatgctcttctgatacatgcacaaactttgaaaactaaagttggccagaaaaaagtagtttctctgcacgctagttggagaatagtatctagctgatttcacgtgtgagttcgtgagcacaccatatttctctgtctgccggagaataacagactcagccctctctggtttattaaaataaaaatcctcaggcaaaaatggggtgaggaatatccacaaaaagctgcaggaaccttgatggggctaagagtatgggggtagaatcaggtcatacgctgggaatacaacttcaatcatcacagacaccctgcatgcaaatgtgtgactgtgcattaaaagaaatacggctccagtgacagctgcgttagatcacgtatgacagaagcaatcctttgcatccgttaaactgctgtcttactgtaaatcttgtaatatgctcttgcagcaaaaccttaagaaggaaagcccctaaactatgaagcttagggtctgtcaactttaagcaccacattgatgaatctaggtctctgggggatttgcccggagccagacaggctgaagacaggagtgcctcttctaagtgacacgcaagcattagtaacccatttgagtaggatactcacttacagaggcattcatgtgccaagacagggcatagaagagagtaatgggatctaaagttagctatgtggagttgcctagtgtgctgcggtaataccagttgccatttttcactggagggagtaaaagggatgaagaggtgtttgtagcttgggctgggccttccacagattggtagtccctgtttcaccttgagaaaccatctgtgactccctgtaacctcagcccatattcctgggggtagggggttcaatgggatcccacactcctgcttttaaagggcaagttagtaagatgaaattcatttacctaaccatggtaaagctcagtttaaatctaagaaaaagaagaccagggagtgagcaatgagtggccaggggaacccttgagagaaacctatttgtatttgaaatttccagtctcttattttccactgacatatgtcgatttcgttaagtagacatgtatgggaaaagtaagtagataaagttacggttcttcccgatagaatcacaggaaatggtcagtcttaataggtctttagatctttgtttccacttgctctaaatgagcatccctggttatgaggagttctctcctccacacacaccttggctgagttccagtgattatgaggcatgcccaggggctctgtcttctgtgacttctcctcaaaggacacaggaaagtttgggtggggctttttatgtccaggagatgatttgcagatctctgtgtgactgctctgcgaaatcatcctggtttatcctgtcttcccttgtcctgcctgtctctccttgagccacattagaagttagtacagccatagtgtctgtgggaggtgtcgggtgtcccacaccagcatgtatagtctctgcatggttggtggaatttaggtcaagcttgggggctctaaaacacttggtatagtactataatcaaaagggtgatacagtcattggctataaacttttccatcattcagccttattaaaatacaccccttttaagccagaatcttttgagaatggcgtttgtgtgtggaccagccctacatttgataatctacctgtcattctggtagatatttacagagcactcagaggtcaaatttaatactattacaggatgttggtattgttcaaggtatggggaatccaggggtttgtctctttgttcagcttccttccttgttgggtgccttggttagagaaggtgtggattgtaagatccgcccctgttaccacccccataaacaccacctagatgaggacagctattgtaccagcaatacagtatgctggcatatacagtatgctggaatgagcagggaccctcctattcccagttacagtggaaagatagagaccatcatcatctttgtagtggttttgttttgttttgttttgtttgagacagagtctcactctgttgcccaggctggaatacagtggtgggatctcagctcactacagcccccacctcccgggttcaagcaagtctcctacctcagccttccaagtagctgggattccaggcatgcgccaccacacccagctagtttttgtatttttagtagagacgaggtttcaccctgttggacaggctggtcttgaactcctggcctcaagtgacccacccgccttggcctcccaaagtgctgggattacaggtgtgggccaccacgcctggccggtagtgttattttaatgtgatatcctgaaaaacgaatgaatgattttaaaggtattccttttgtgttgtatgtcctcacattacaccacctattctctggaactgatttttatttttccaggaaggcagtatatctacatgtgtctggtacagggatgtgagttagtcctttactgttagcttgattcaacgatcaaagcattttttccttatctttttccagtctgcacagtgttcttttctgcagagaatgagtaaattcttaaatgacctttgtaaatgcccacaaataataactgtagctttggttgcagagtgctgatgaactagcaagttccatagatccatttcattgtgctgtatcgcatgatgctttatctgtaggatgatgtgttcagcaaagagcagatttgtttataagcctctgatttttatgtagcgcgctctctctctctctctttttaatccctcttgggtaagtggttatgaatagcgaaaatatgtgaatgtccttggcactttgaatcaataaatgccttctgttttgtgtgtatgtacagaatactgggaaaaattttgtcattaagttttactttaacttcttttcccctaagattgaatagccatagtctttcagattttagctgcccagataactggaacatagataattttttccaagtaggaagtgcgtgcctttattgtctaatagatccatggtctttgatgacaaaggactttatgagatttgctagtttttccctcaacaaagagtgaaatcaaaaatctcactaccttttgcttttaaccccctcccacccccgccccctgccccattccctgtgtggtgaatagcctgagaatagggacagtgcccaagagttcacccactttcagagccagagggctcctgtgacccacgtcgctctccttgacatcatttccaaaaaacaaatctcggggagcctttcctggcagcagcccacagtgggagtggaagggccttggaagtgttaattctgtaagtacttctactggttttatgtgtcacttctagatctttgttggtagaaccatgaaggatttaaggtgccaatttgttgtgacaataactggtgtaaaagtgggcttctcacggtcactcaggagaagggacatggtcccttcagttggttacttctgattccaggctggctctgcattcttttgtgtatcttcagcctgggcaaacaaaaagctcttcctaggttagcaaagcaaatggggcgggaatcaggactctggcatggcccttacaggcaggcagtaatgagccagggccgattcgggatggaagccagcaaaagtgggtctgggcctggcgtttggctgaccccggtaagagagctcctttctcaggtctgtcagcggccagcagcctttgtgcggctctctagagttcagatccaagcagacatgttgggtctcaaaatcaagtcctgtgaagtgttcttggtgtgaatgaaaggttctttagagaactagaggctatagaaaaagaggtgaaggtgactcaaacttgaaggaaacattgaaagggcatgattgttgccttagccctacagtgagcaagttatttatgcctttttgcattcccttcgatgcacccacaaaaagggggaggtaataaataagtagttttttttttttttttttaataaaaagaactaagagagtaagaaggattgccaaatggagtaaaagtcaatcatgattaacatggtatagctgacacaggtatttggaagagaaaaagagtcatgtcttggagtggttagggtagaattttaaacacgggccttttgtggggaaagccagttatgagtgccaaacagtttgaaaactggcttatagagcttttgtacttctggaatgaatgttagatatagtttggagcagagctcaggtacaagctccatctaatggacacctgtcatgacgggtcagagttgtgaagttaaatatttggttgtctgtcaccatggaaacgtgtgtagtatgcataatatgacataaacacaaccctttccaggcggaaaaaaggctgatgtctaggatcacaatctctgaatccttctgatctttctgtagctgtctctctggatcaatgagaagatgctcacagcccaggacatgtcttacgatgaagccagaaatctgcacagtaaatggttgaagcatcaagcatttatggcagaacttgcatccaacaaagaatggcttgacaaaatcgagaaggtgagttaaaacatttgatgtggccatggtgagaaaacaaacagggtagtaataaactcctttttatttagcacattttccagcatatctgatcttatctgtacatttacgtaagttacacagccagtaatagctccctttgcacgtacgggttcctgacttcaacccatcaaaagggaaaaaagcagaaacccaaccagttagtagaaaatgcttgatttatcgtagaacgaatactaggcatttagtttctgttgtgcctctcatctgctgttgctgatggactgtgagctctcatgcagggattccactgtcttgatcatattatttgtgttgtactgtgacagattgcacataattttaaatatatacatattttttaaaattgctttttcctatgagactactgtataccaggcgctataataattactatgatgtgttattcttgcacagagagattctgggcagcataactgaagatgaatatggagtcccccccttccccccgacttctctccttttagactttttatagtgtttcagattcttcacggttaaaataatgtgttggcagggcacggtggctcatgcctgtaatcccagcactttgggaggccaaggcagatggatcactggaggccaggagtttcagaccagcttggccaacatggtgaaaccccatctctatgaagcatacaaaaatagccaggcctggtggtatgtgcctgtaatcgcagctattggggaggctgaggcacgagcccaggaggcagaggttgcagtgagctgagatcacgccactgtacttcagcctgggtgatagaacgagactctgtctcaatataataacaataataataataataataataataataatgtgttgtatatcatctttggtcatggaatggaggagataaagtcacgttattagcattcagtattccgttgccccagttgagactatttcagcatgtaacatttattgcttaattcccatgaaacccttgtaatgtacacaacctaggggtcgttgttgattttattgagcagtaacttcatgtggaaagactgtgtgtattgagtgaatggttaaatcacagatcaaatgtcctaggtttgtttttcacagtgacattttttctgtagcaaacttgtttatttacaaccatgttggttttgttttccaggaaggaatgcagctcatttcagaaaagcctgagacggaagctgtggtgaaggagaaactcactggtttacataaaatgtgggaagtccttgaatccactacccagacaaaggcccagcggctctttgatgcaaacaaggccgaacttttcacccagagctgtgcagatctagacaaatggctgcacggcctggagagtcagattcagtctgatgactatggcaaagacctgaccagtgtcaatatcctgctgaaaaagcaacaggcaagtggacaagccatcatggacttgggtgtatttctgttttacagccatagtccttagagtcttttctcacccactgcattatcaggagtccaccttccatgggaaggcatttttaacccaaaatattacttgctctaacagcatcgtagaacatttccagaatagaaagacacttgtccaaactagaaagacacagtattaggagtattgggtgttggctgtctgtgtatgggattgataattttcttagttaatgggtattatcaccgtttaacagttaaataaatgttcatctcattcaattctgcattttacacgaaagaaatattctcatactttgttgtttaacatcgtgatttgtgacagttatctgagttgttcaaggcactttataggtaataaaaataactgtttatattatatcaccgtagagggctttaagggcaaatgaatttacctcagatttacttgaaaacagttccattgatgttgaaaagcaagtcagtggcaaaatgtttgagtggctcccatggctggctttgcggtgtggccaagtcccaggcccagcagttctgcttagagccagtcactgcaaaagatagtctgtgctgagcgctgaggctgcttctctgccctcagatgctggagaatcagatggaagtgcggaagaaggagatcgaagagctccaaagccaagcccaggccctgagtcaggaagggaagagcaccgacgaggtagacagcaagcgcctcaccgtgcagaccaagttcatggagttgctggagcccttgaacgagaggaagcataacctgctggcctccaaagagatccatcagttcaacagggatgtggaggacgagatcgtgagtcgacccctactgcacacatggcttttccacgagcccccttgcctgtgctaaagcccacattctcacttctcagtcatcctcaccttgggccacgttggcaagctgagctgccaaagtccacgctctggatggtctaaagtttctttcccttttcaccctaaatgtaactccattggtcctctcacgttatctagggatactgtaggattttaatggccctaaaacagactttttaaaagtaatgaggactcacagtgagtttgaccttgaggatgaggtagagttggaaagactctccctagccctgtctcggagaacaagggcgtgcttccccagacagccctcccgagggggctgagcactctctgaagctcacccttgctgtccctcactgcccctcactgctcgtttgtgtcgtatatttgttcctctgagtggatctgaccacttatttaaaattcttcccagttgtgggttggagagaggatgcctttggcaacttccacggatcatggccacaacctccagactgtgcagctgttaataaagaaaaatcaggtaagcctttctgctcgagctagttctgtctgataaataattgctctaaattatgagactgggaatggcagagagctttgaagccttgctatttctttctggccctaacagcttgacataagcagcagacggctgccatttagcaagcctttgtgtgtattttccgctccctccagaccctccagaaagaaatccaggggcaccagcctcgcattgacgacatctttgagaggagccaaaacatcgtcactgacagcagcagcctcagcgctgaggccatcagacagaggcttgccgacctgaagcagctgtggggtctcctcattgaggagacagagaaacgccacaggcggctggaggaggcgcacagggcccagcagtactactttgacgctgctgaggccgaagcctggatgagcgagcaggagctgtacatgatgtcagaggagaaggccaaggtgagaggaggcgggaagcatccctgtcccaggagagcctcagattcaaaccctgggcacactttctgctggcggctctgtctgtataaaaacttcccttgtagcctttgagtgttaaggggacaccatgtgcatgaaggtgtctgaaatccagctgctggtttccctttggtgcagcattttcttatctgaatcctagtgtgccattaagaacaggttcatcctttcatctttgaaatatgccagagtccttcctgctgtctatttataggttccctaaactttacaaaatacaggatggcttggagacaatttgaaagtattgcaaggttccaggaatgctgccatttacatacttgagggaccttgaggaattccagcgaaccaggcacacttggtctgcccaagcttttctctgagaggggccctgctcattctgcgttctccttgtgtttatcttctgcacaggcttctgtggtccagtccatatggaagctcttggaacacttctgtgttccactgtccgtactgcacctctggagtttttctttctactgatccttcctcctaccctgctgagcagctggtctgtcactccttaaggggtagggccagaggggaccgctatggttgtgatgttctcctgtctttgcaggatgagcagagtgctgtctccatgttgaagaagcaccagatcttagaacaagctgtggaggactatgcagagaccgtgcatcagctctccaagaccagccgggccctggtggccgacagccatcctgaaaggtgagcgctgcttcatgagtgtgagacccggctctcgattcctctcagttagggtctcttgctaacccccaccaaaagaaaatgtcagcattcatcatgacttgctggtaaggcaaatctttgagaagcatttttaaaacagacccatcatttaaaacatcctatcatgattaggatgggtgaactgttatattaggaaattgctcttgtgggttaaatatctcccgttggccaaggctctcctgaaagaatattggtgtcgtgagtcaaaagtacaggttgactaggctgggcagtcaacgtaaagtggcttacacttgtaatcccagcactttaccaagccaaggtgggaggattgcttgagcccagggggccaaagaccaatctcggcaatgtggcgaaacctcatctctacaaaaaatacaaaaaatcagctgggtgtggtggcacacgtctgtactactcagctattcaagaggctgaggttgggaggatggtttgagtccaggagtttgagtctacagtgaaccatgttcacactgctgcactccagcctgggtgacagagtgagaccttgtctcaaaaaaataaaaatgatcagaagtacaggttgacttgcatggtggatacagatagtcatagcacttacacttgggttgaaaaagtcatccagtttagtaaagtaattactagttttaagaggagcattagacaagaatgcatagacctgtaaaatgaaggggctcccaggaagaacaaagtgataacacctcctaactcttcgatatcaagtgattagaacaccttcgaggaaaaagaagaggtgagtgtgtggtactcatcaggcccctgtattaacttccaaagcagtcattttaggatttttgtgtaaatgccttttatgacttggaaaggaattggccttgtgcatttaaccagggcaggttaggggagatgaggtcagtggctctgttggtgtaggaggttcttaagatgttcatgatcaggattcccaggaaagtggccttcctagtctccagggataggcaccaacatgtcctttgtctctgatattctggtttgtagaccatcactctggggagaagttggagggagggggattcagtctcctgactgcgcacctgggaatcatgagatggagcagccggtccagccctcctaacaaggatgggcactctgcccagagaaggtagagggccttgcgtgccacactggctgtgtcatttgtccctctggcagcatggtaccagagaatgcaagaccactctggattttgcattaacttattttctcttttgtcaccttcctgactgggaagattttgcattaacttttaacatcaaaggaaatcctgatttgcagagccagaggtgcagagagaattttcccctttccccgctaaattctcctgcccccactattcactgcagcagaatgaggcactacccatccctagtgtaatagtagggataggtgaatgtagtttacatattggctcttttgtttacatattggctcttcacgacttcaaattgtggccaatttcagaattttatttttcatgctaagtgggttaaccagagtttcctttgagaaatatgatgtaatatgctctcccattatctccacctcatttgtttttcccctgaagaaacttgacatttaagatcctttttctccccattgctccttttctttttcagtgagcgcattagcatgcggcagtccaaagtggataaactgtacgctggtctgaaagaccttgctgaagagagaagaggcaagctggatgagagacacaggttattccagctcaaccgggaggtggacgacctggagcagtggatcgctgagagggaggtggtcgcagggtcccatgaactgggacaggactatgagcatgtcacggcaagtacttgaggcagtgcatgagttggttgtgcagtaagcgatggtgtggaaggccatttgcattccttgtctgtgagcagataaaatgccctggactccaatcagaggtcttggggtttagttttaaggtggtgtttcttttataagctggtgactcgcatttaggttggctaacctctctgtgcaccccttcctccggtagtaaaaggaggtggaggtagtgcctcactctgctgcagtgagcaagaaaggaaacccagttgctaagaggttctcgagctaagatctattgttctgaagtcatgagtattattggctacatcttgcttagaggcagtttctttccaaagggtattcatgtgatcaagaaatacagagttcacagtgggctctctgatttccttacccatccccgtttcagatgttacaagaacgattccgggagtttgcccgagacaccgggaacattgggcaggagcgcgtggacacggtcaatcacctggcagatgagctcatcaactctggacattcagatgccgccaccatcgctgaatggaaggatggcctcaatgaagcctgggccgacctcctggagctcattgacacaagaacacagattcttgccgcttcctatgaactgcacaagttttaccacgatgccaaggagatctttgggcgtatacaggacaaacacaagaaactccctgaggagcttgggagagatcagaacacagtggagaccttacagagaatgcacactacatttgagcatgacatccaggctctgggcacacaggtgggtatggcagccacccaggggtgctggggaggctttttctccatagaacatctttgggcatctgtaagtatctccctgttccttggctcttcaaaagaattgccccaattaagcacatacatgtacccactttgtaatagtgctccatttgggagaacttatcagtccataaaggtctacgtttgccacatttgtgaacattagatgagtgcccccatgattaaaataaataaaccagatgcatacacagatgtttgcaagttataggcctcagcaagtgtttttattatgttagcatatccatccagaacaatttccaaaataatattttactatttttcatcaaccaggttctaagttgtatgtctggaaaaagaaaaaaacaggattctgacattttatcatgcctcgtccccagtatgaaatgactggcactaagactttgtttaaaagatgtttgacaaagtagtaacaatataacagaatctagtgtaatcactctctagtttcctttctgatctctgcacagtttcttgtttagtcttatgccttttagttgaaaaacaaattgtattttttttcttctaagtttcatggccctagagaagaagccaattttattaaagatgttatccctgattatgtcaagggttcttgttgttaagagtatattgagtatctaagttatctcagctttttctgttaaaggccaaatagtgtttttcgctttatgagatacatactctgttgcagctctgccctctgtcattgtagaataaagcagccatagacagtgagaagatgaatgagcgtagctgtgttccaataaatctttatttacagaaacaggccacccagatatggccttgggctgacccagtctagtgcctcagcctctaaatagctttggtatactttgggatttgttctatgaagggaccaccttgatagttgttctctctcacttccccttaattcttaattcctgtcactatgatggcaagtttaatttacctctctaagctttggttccctaatagtttaaggattgaggtgcaaaacatatgacatagtgagatctctagaaatgttttctaattattattatataacaaaagtttagggaaacatgggatatctagagatagaattagaaaacaccttgacaacataggtctttcctctgcacctctaaaatcatttacttttagaactgcaagacacttgagagacagtggagttgctctctcattttttcattaaatcccttcacctcattagacttagagatgaggaagccaaagaagggtctcggaacatccagggtgggaatctcgtccctcgagtctgatagtctgcacctcaccatacccactgggctatgatgttatagcagtgaaaaggatgtgtgtcctactgcaggtattgacctgatctgggtttcttttcacagaataacagagcaaaagggaaggctcatggtgcaggctcccaggagtacatggtgcttcttctttggttgtttccttttgtgccaacttgaagtgccactgtctccattctgcacgggagctgtgggaatgacacatagcactgatggaggtcttgagtggttatgcaaagcaatagttcatatttgtggaaattttcacttttgctgtcctcttgtaccttacattttattgcgagcaaattgaaaacagccagagacacagaaacaggtgttttgaaaaatatggttcattgtgtaggaaaattagcttttcagataatttcctaggaatttgctcattgtaatttgagttaaacctgagccataatcaaagaatatttccaaaaatcctttaggatatggaaatcaaatcacactggaaaccaaagcctgttggttcttctttgtatcttttgcagaaactgctttttttcttttttaacctgttatcacctaaagtgcttctgtgcaatcaggggtcagtaatccacctccccacaagccctactgctgtccgtacccccccgccttttaccccacttagcatttctccatattctactctcatagacatctaaaagctctcataatccaggacagttgtctgcggacttctttgatcacgcagctttatcagtacgtgatgattgtgtgtccattcccctatatgtgtatgcctttaattagacattgtacacaagtatggcactactgatgttacatactttatataaggcatgtaagaggagaaaatttaactataaaattagctgcagttattagcttcagttttaaagacatataccgttccccaaaaaaaaggtaagaatgtaatcttatttttgtttttacagaagaaaaatattatgcacgttgtcttccacttcattgtcatcttggtgtgcttttcatgtgactacacagaggcccttcctcattctttttcatggctgcacaggagtctcctgctggatgcaccatcattaatttaaccagtccttcactgatagtcactttattttcagtcttttgcttttacagacactgctgcagtaaataatctatgcatatttcgtatcctaaatatgcaagaatgtatatgtaggatcaattccccaaagtaggatcataaaatcagaaggtaccacatttataattttcatgggtactgcccatttaccttctgtaggagctgtagtctgttacactcctgtctacagagaatgagctcactgacaaatatatcatcacacttggatttttgccaactaatagatgacacattacagtatctccatgaagcatcttttcatgtttaagacccatttgcatttcctgctttctgaatgttttcttcatgccagtttctgtgttggtttgttggtttttttcttttctttctttctttctttctttcttttatttatgactgtcatagctgaaaaagataactcaaccaaaatatgtagatgtaagtagaagtgtaccattggctccatttaccaaatcacaattctcaatgtatatttttagttttgcaaggtttttgttgaaatttggctatttcaagtttcaccttctttaacgttaattagttattttaaccacatagggtgccacgtttttatactttttgagtgtaaatgtcccacggtgagaactcttacaggcgatacatacattgtattcacatagcaatgagaagtcattttcaaaatgtgctcttcatggcagtttcccattcatcataaaaacatttatctttaccccgagatagcagattaggtatttattttttggactgtatctgaatatgtcccactcagatatcccaggctgcctccaggggactttccctgactaaactctcctgcctgtcttcctgtagcatttcatttgttttatcattcataaagaacttaataatgtagttgaacagatttatagaaaacgggtttttgtgacttggatctccccagtgaaattgagggctccttaaggggcatgggccatattttgactctgtgctccctttagtgtatgagcagaacagaatagggcttggggtgatggtgggaaggccgccatgggctgacctggctcatcccctacatggcttcacaggtgaggcagctgcaggaggatgcagcccgcctccaggcggcctatgcgggtgacaaggccgacgatatccagaagcgcgagaacgaggtcctggaagcctggaagtccctcctggacgcctgtgagagccgcagggtgcggctggtggacacaggggacaagttccgcttcttcagcatggtgcgcgacctcatgctctggatggaggatgtcatccggcagatcgaggcccaggagaagccaaggtaacgctttcagcccaaaggaaattggacttattggcgcttggttaaaacacaggagtcttccagagagaagcaggagccttgaaagcgttcctgcctgagcgcttcaaggccagagtgggggtggggcggtgcttggagtgcggcaccactgcttgcctcgtgcacttggctcgtgcacaccatcaccagggaatgtgggagcctggggttatcaaagcctgtcccattctccctactcctggctcccttgacccacagtcactcaggccctcttgcccacatatgtgcttgaagtaggaccttgggcttcaagtagccacgtaccttggacatgactaactgccccgtctttgcaatgagatgacttttctgagttatttttctgtgcctgctttttggattaaagaccactctatccctttccatgcacattactaaaggtgtcaccctcaacatctgctttaatatggtgtccttgggttattatttaatatttgtcctatatctttggctttgtttcatgcaaattagtgaagagaagttaatagaggaacacacaggtacatatttaacctccagttcacccctctgccagctccagcccccactgtaattgagaaactatgctgcaataaaagggattttttatgatatatatttttttgaagcagttgtatttcctggatcaggatcagtaggttttgatccatgctggtcactgctgtctaggctagttcccatcctgtgtatctttttgtgtctgaataaggagaccgtattagctgctctttgatatggccatcctgaatctttgacagctaactcatcaaggtgcgattgcggcacctcttgctgcttctctactttctagaagagagtctttctgacttgcatttcaaagtaaaagtttgaacagaaaaccattgctttttctggcacccacctagcaaccattttgaattattcaggcacacacacaaaaacaaaagcagccatattctacagtttggttacctggctggtactgaactgtgctgtcactgtgctttggctccagtggcccagcctaagctcagggagtgattcagacctgaaagaccatcagtttctttcaaggccatcagtttctttcaaattaattgtgtgttttaaaacctacacattttttgaaaagcttgatctcctaacggaggcatcgtttgtctaattttagggatgtatcatctgttgaactcttaatgaataatcatcaaggcatcaaagctgaaattgatgcacgtaatgacagtttcacaacctgcattgaacttgggaaatccctgttggcgagaaaacactatgcatctgaggaggtaggttgctactttgctttggagctgcagctggcgtcaagatgtaaaatgactttgttttatatgtttgtgtgtgtcagagatactgtgtttacattcttatacacacacacatatgttttaaaactcctttcctgtgcgtctagaataatgcaattatgcaagactctaggcccaggctggtaaatctctggcacagaagacaatttttgagggctacaaaatggactccgcatcctccccaatcagtactctttctaggtgacgccaatgtccattgactatgccctagatcagtttgctgttgagtgcatggttggtgattctggttaggatggtggtaataaagaggtaaattattaggtgcgtgtgtggccccctgcatgggaatgggcatcctctccaagaggtcagggctttgtccgtcttgctgtccctctcctgaacgtgtttgccgcagggagcctcctcacgacaaaacagctttggcagggcttccgcgccttcctccagccccttctggaaggagcagtgctatgcttttctttcctctcccagtcctcagacagactgagcagtccttagatatctcccagcttaatggtggtctttgcagaaaatgtatttttctagtataaaatgaccccatcaagaggatgtggtgcattccattaagatgtcccggggatcctctttttcatacagatcaaggaaaaattactgcagttgacggaaaagaggaaagaaatgatcgacaagtgggaagaccgatgggaatggttaagactgagtaaggatgtagtttatctttctgctcttttgggtatcaatggaaaacatgcacgtttattttcttgctttaattcattaatgttatcatttaaagattgttcgagttgtagatgcctttttagtgccccgtttcaccatttcatggtaaatactacttttaagaagcttcctatggcgtagtcatttttcacctcttgattgatctcagtgtcataggtgggatttggatgttctttagggatgacagagggcacctccctgggagaatacagatagaagccctctcccccatttgtcttcaagaattcttactacagaatcaagttggaaagttgatctcattaagtcatatttggtgctcttagtggaatgttgataacataataaaaactaacatctattaaaattttgctgtgaatgaggcattgttctaagtggttttttaatgtatttctgtgtttattccccaaagtgaccctgtgaattagattctatttttaattctcattttataagggaatatgtgagctaatacagggtttataatgtacagtattaggaatagcatttcataattggtatgagcactaacagcgcaattctagcattgcttaccatgctttgccattctctgttggagttctgggctctgtccttatgttctaactccatctatgcatgttatgggggtttactagaaaccaaatgcaagggccttttctgagaggtttgacggcacactctgttgggcccagagccctcagaaatcccactttttgaccattctttgcaggaggatttggtctgtatgttttgagaattgtggggcagtttcattcagctcagcaaaacccacattacacactgaaccgggcaccagcttgtacaccagggacacagtgatatgcacagtccctgccttgaaaagccagtaagtccctagtgcagaggtggcatcttcttcatgtagtcatgttgggggctaccgaggtgctgaaagcagatagctagccagctccttgggacaccaacgctgcccacagtccattttttacctcaatgatcccaggctttgctgcatgaaatgaagtgaaaatcagtgttaactatagcagaaagcctggttctaacctaccttctcataactatgttggaactagtgttccatttcctcacaggtggaagaacagaatgaaacagagcaaaagccttggtccccaccatctgtagtgttcccatatccttccctccctctaaaccccccaaaataaaacacacaactaccgcccaaaagagggcgagttaagaatgcctgcccatctggctacgtgtagattgtgaattcctgcaggtctctgaaggcttagctcatgaagtggggccgagtgaacagagcgttcactgtagacctgcgctgagcagtatgatagctgctttcccacgtgtggctcttgagaacttgaaatgtctcaaattgagatgggcagtgaatgtgtgccgtaaaatgcacatcagatttagatttagaagaaaaaagattgtaacagatctcaatagtttttttcatattgattacatgttgtaataattttatacatattatgtgaaatacactattaaagttaatttcacctatttatttttactctttttaatgtggctactggaaaagtcaaagttgcaagtgtggctcacattacatttacattggacagggctaatttagagtagacgatagactggttatgcaggtagccatcaccagagggcagcagtgccaagaggtaaggccatatgactgcccggcacctcctggtcaacgtgtactaactcatggtaccctgtgcagttctggaggtccatcagttctcaagagacgccagtgtggccgaggcctggctgcttggacaggagccgtacctatccagccgagagataggccagagcgtggacgaggtggagaagctcatcaagcgccacgaggcatttgaaaagtctgcagcaacctgggatgagaggttctctgccctggaaaggctgactacagtaagtggccgctgggccctttgtctgttggtgccctgggcagccttttcttcctgcttgcctcttagaccagggaattcacacgattgcttgtttttgttttttgggtttttttcaagtagtgaagatcatcttaaaatgggtggctcctgtggagcaggacctagggagagggtcaggactgttacctcctcagtcacatcctgggcacctggatttatgatcccttatagtagcttcctgcctgggggttgattggtggtgtttgcttttttcttcgaatctttcattctcccctatctcataaaagctttgttctcaagggggcatggcctcaaaattttcttcagaatttcagaattagaattcccatcaaatggaagcttaatcctagcctgttgttaagtccccagtcctgatcccctcttctgtcaacataaaggccttagaataggatttgtgcactggtgtttcctctcccaagacttttgcattcctggtagaaagctgatcctttgcagtgtacaaaaatggtgtttctggtttccagttctgggtgtttaaaatgtacctgcatacatttgtgttaaaacagagtacttctggtacatccatatgactcatgaaatggctttgtttcagttagactattctgtggctttttaatgtgttgtttgggttttggctgaacacagatccccaccacagcacaagcggcttccttgagaattattgcagctctgtccctggtgtttgtctgagctctcctggggagtccagcatgaaccctcaggctcaggtacttttctcctcagcagagttgagagttgcatagttactttagaaattaaacccaagctcccaggggtcctacaaacaactcacaggaattttgccagcccatggaatagactatttcctgtagttttaggttgtagctgcagttcctgtgaacctaattccatttggctcaggatgttagagcttcttgtccagtgtggtccagtttagcaaactagacaggaggacttcctgggttcctagaacctttttctgaaaagaggcagagtttgggactctaccaaacatcactctattttctcttagttggagttactggaagtgcgcagacagcaagaggaagaggagaggaagaggcggccgccttctcccgagccgagcacgaaggtttcagaggaagccgagtcccagcagcagtggtgagtcccagcagctccagaggctggacccttagcctcggtggccaatgaggtttatggggcatctttctgaagccttgcattgctaggcctaaccacatgccctgcctactgattgcttccatagactgtttaaaggctgtacagttatccctaaataaccttggagggcactgatttgtccacagtcacataggtatgtaggtggcagaagtagaatgtagacagtgccctttctcatcctgtgtgcacacacacaggatgctcagaacttccatatgattaaatgcatggagtgaactgcccagattttaggccagtgattttgtggtgatgcgttttttgagagttctaagtaacttcacacagagggcagcaattattctctacttccaaagggctaattattttgctatggtaagagttccatggcaacctctaatgctgcctttatgtggtggagcggggcatagggcattcctgtagtcgtatttttctgtctagagtctatttaaaacacttggaagtttcagatttaaaaagaattaaattatgtgaaaaggttgcacgtaataaaattgagtgatgatgttctcccaccctttcttactgtttcctctttctcctcttcttcctttcccttcctccttttcccctcttccctaacagggatacttcaaaaggagaacaagtttcccaaaacggtttgccagctgaacagggatctccacgggttagttaccgctctcaaacctaccaaaactacaaaaactttaatagcagacggacagccagtgaccagccatggtctggactgtgaagttcactaccatttgtcaagaatcaccctttccaaatcctctgggttttgactttttggcttccacttcacccaaaatgttaaaatttttacttaattcatagccttccttggtttcatatttgtttgcatttaattcatgtttgagtctcttaactgatggatgcccacttgccttaaagcagcatacttattttttgtttatttattgtgagctttttactttattaagattttacagcgaaacccttacatgagtaattgaaatgaaattaaatgagattacagcataatgaagaagaaaactagaatctaacaggtatgacacattcagttattctaacagggcacagtactgtgctatatgtagccgcctttacagatgttattaacctatagtagtttactattaactaggaagactggtgtatgaggagggagacattctgtaataagattaaaacctaaagtcagctgtgtaacattccatgaaagatgcattcatttattgaagatgacaaaaaagggagtcagatatattctggaagctattttaattttaggcacacaatctcatacattttgagacccttgggtcatttattactttttacaaactagttcctctctttttttctgccaagtcctgaattgaaaactgtaggcttccttgcacagatgttgcagccagcctcaggagtaaagtgcccgctgactgctgccgccacctctgtctcgctccctgtcagtgctgctggcacgtgggacgcggcaggtgacagccgttctcagcatgttttagaagcttgcctcacagacttccatgcctctccattcagccgatgacttcagggtgtcaaactgttttaatttttcaaacaaatggaacagaagccattgtggttcatcctgattacttgaacgttgcacttggtggaccgtgcctgggagcgctcgcatgccccctggcttcagaagtcatgtcagtgtctctgtagacaaactccactgtacatcttggattaatcttctgattcattgttcattttctcaagactttttgtggaattctctgataaaggaagcttttaggatggtatctatcaggccaccagcaggaattgaaaatgttttcacaaaaatccttttccttagaaataaaagctggtgacagagatggtttccttgtaccgataaaaacaaaaccaaatccatattatacatcaaaaccttgtgagacattcacttgctcttttgccatatttagatgtgtcagtggaatcagaaacctgttttgatatgtgttctctatgagttaagtctgatttgtctttttatttcatgatgcatgtcttttttttcttttgtcaggataacgtcatatagcatcttgtttgtttttccttatctctatgtacatatctatctacttctgactgtagatgggtatatagatagatgccaagcttcttatgttctgggggtagtatgcatcattattgggtctctgccttaaaacacatcaaaattcattttagacaaaaaaacttctgctttgtctttggtcattagggagctctaatgtgtgtttgtggctccaagttacattttgtgtttcattgatctatatgtatatatgtgatgttttcatatatatatgtgtgtgtgtttaaattttgtatcatcaggactgacacccaatttgacactttttgtatctagaagaccctccaaaaaaggaaccacataagcacacaagaaaagagtgctatgatgttcttagcatttgctatcatgcctatttttatctagatttttaaatgtagcttgtcataacaaaattttaattacaattggcttgtatgagaagaaaaagtatttttattgttttgagtgatgacgcagagactcagtgaacttgaaaatagcattgcttcgtgcactttgaataccaatcaggtgttttctgtgctactagttgtcacgttgcattcatgttcacctcctgatttaagtatctcgggtgtgcccagccactaaagcactctggactaatcgctaaagagaagcaacgtggggggtggggttgcgagggatgtgttcacatgtacccatcatttgatcatagcactgtgattgcttttgatgtgtgtctctagtggtgtgctgtctgttggcatgcttaaagcacatgtccattaaaattcattttgttccttttattttccttgttttcttggttagtgattcatttgcataaacattaatgatctctgcatactggtttggggttttctctttccttctaactctaaagaaaaaatttttgctgcagaattatcctcagaagaggcttccctggccttcatctaccttgcagtctgaccaagtatgataaattttagccgttttcaaggaaacatctctctacccaggtcattgctgtcactagcagctttcaagtcaaacctgcagcactaaatttttttttatcctggtttctctacatactaaccccatgtctctctggactcacacctggctcaggccttccagaccaaactcatacttcctcctcaccagaagtttccgaatctcacactagagaagatttgtcacctttaaagtccactcacattattttgactcagggttttgttttttgtctatttcccctcctgcaactctcctttaaaagtgaaaagagagagaatggtttaagtagtctgttgctcataagcacgtgtctgcagtctgtcacttgcaaggccttggtgatcaccatgcagcacttgtgcgcacacacacccccacaagtcttttttcctaataatccattttccacattgccatgagggtaaagggttccaatcaaaaccaccattaaactgcatagtttctagtcttccctcagccctgatgctaattatgatagtttgcatagacataacttaaacttgtgattctccctccttccagagctttttgtagccctttttccccccaaaattagttttgttcaaaatcaagcattgggcccagccattaagataagacctaataagtgagagatacagttcccaagagtttacagatccaggtgttcacatggtggtggccagtctaccgtttatcttgtcaaggttgttactgctaatttggtgtcactttggtcttgggcagcagtggtgggcgacgtatctaatgagcgtgccattgacttctccatgtttgtctgtgtacgaggggtgcaggttgtctgtaatccactaaagtgtcagccacacccagctttagtaactcgctaatcgcacaccctgggtgtatcagccaggggctgctacagttaatggtacacagttgatggtacacaggctgaaaatgataatgaatcaagaccctactacatttccaaagccgaaaagccatgagggttacaatttaaatgagcttgggaaggaacgctcccgaagacgtctccagcctgaagggtcagagccgctggaagcctggctgtctctgggctttctcgtctcagtgcagcaaggcaccgtgatcaaccaacccgtgatggggaaggccctggttctgtctttgtttgggggtaaatagctgtgtggtgttgagtgactgtgattggcttttccagctcctttaacacaaactacaacccactcacgatacaacttcggcagatgtggtcaaattgatgtttgttgacttgcctcatttccttccagctcttaagttccaaagtctaactgggatggtagatgtgaaatgcatgattgtcgtcctaatttctgcatgtgtttatgacaatgtgttgaggggagggggaggagagccagagagcattttcaggaaccgaggtctttccttgtcttactctgggggaatgccatgtagctctgatagagttgtctatcggtctgtttgtgaatgccctttcgcttaaacttccagcccttctggtggcatccttggttgtaaggtggctgctgtataacgtccactctctttcatatttaatatgtgtgattgttactgttgtctttttgttttaaagtaaccataagaggagatgatctgagttatatttattgatcagaggaatagagtgcagtaaaactcatactggcatttcgcttttctcatttccctgtaaatgggcgggtattaatccattcccaccttctaatgtccttgatgtccagctggctttgtgggtgtgcaatggttttactgtactgcctcgatctgtgccaggcatttatacacagccacatgtgcgagtcaggtagagcgtatgtggtcacccccatggctcacggagttagctgaatggcctctccgctgtccctagatggcagaaacggtggacacaagcgaaatggtcaacggcgctacagaacaaaggacgagctctaaagagtccagccccatcccctccccgacctctgatcgtaaagccaagactgccctcccagcccagagtgccgccaccttaccagccagaacccaggagacaccttcggcccagatggaaggcttcctcaatcggaaacacgagtgggaggcccacaataagaaagcctcaagcaggtaacagcagcagaggctgccacagtaagatgggaagtcagcctgtgaagggataaggcgggccactcttgaattggaagagaagtatgtgctcatgtagttttattcctttggtagcttcctggacattgcattcttcttgggctgacgctggaaagcaggagtagaatgctggttattcactgagagaagaagagttgagtttggatgggagtagctagaaggggctttagtagttcatctagagaaggaatttgctagattgagactgaagagtcttctttactttaagtgattgatttcatttaggactccttgtgggttttttgtaaaaagccattaaccatttcccctgccctgatctccatatcagcctttatatatattcattgtctctcaacagccccaatttttttatttaacagatggggaacagaggctctgagcggttaacaaagctttctttctgtggaaacctagtaaatggcaaagctggaatatgaaactgcaaagcctatgtgcttaactagtaaacccaaccacctgggaccaccatatcttactgtgcagtttgttgctgtgtgaggggatcagaacatctaagaactgccattcacgttgaggacaacatagggatttatatattaatacatgctggtgtaatacaggccggtgttctgttaaaattagtatattaggacagtttgccataccataggggaaaagccactttattctaattcacccaaaggtactgtaagtgctgatggctctgggtctgtctttctgtcaagttgccaagtcacataagtaatgaatccgcagctggaggagctgctgctggaggacaggcatgttttcagacaggagcatggcctttagctcatgaccataagagggcgctacagcaaagagtactaaataccaatcaaagtgagctcagagtacaagagggtaacttgcttttctccgaagtgaaagagaagacatagtcctcaaacacttgccctgtgccctgtccctgaactctccatggaggaattttttctgttgtttagtgttagcagaatttaggaagggcttgtaataaggaaggttgagggttgggtggggtcacactgtgttgtgtgaggatcattttcatgttaatgaaatgtttagttctttaaggggaatgtggtagagcctttatctccccctgcccttttttttaaactgcacaggtcctggcacaatgtttattgtgtcataaataaccaagaaatgggtttctacaaagatgcaaagactgctgcttctggaattccctaccacagcgaggtccctgtgagtttgaaagaagctgtctgcgaagtggcccttgattacaaaaagaagaaacacgtattcaagctaaggtgagagtcgccgtgcttcatggctgccagagtgggtttgcatttacttccactctggggtttggttttcttatacagctgctgtgattagttggttctgtcttctgccattttaaatccccaataaagtgaaaaaccagtttggcacgtgtctcggttaggctgaattctttggcaactgtggccagccaccagcttccctgtggttaacagtacatctgagcattgaaggataaggagcttttgcttttataaccaggcacttactgttccctaagacttaaagagagctagtcacatttcacagtttaagggaggctttgaaaaatagtttccccatcttttcagcttatcccgacccaggagatgctattctttgctcatgaattatctggagatgggtcaagtgagtcatcctggagctggatggagacaaacaggaaatgtttgggtggggcctgggaccctgtcctcccctgactctcccagcagatgctccagctgtctcagaaccatctagttccaaatgtctctaccctgtaggatacatgtatctccctacagagtggagctaagctcagaatttctcctcacacttggaagtaggcagaaaaattattttatcttgtaaaaagtggttagaatgcttgtttactgatttgtgctgttgctttgggatctgaaaagctttggtcttccatttatttgtatgtttcatgccagttggactaggcccagggctccagaggagagagtgtcagatggtttgatttattaagctctgctgctgcgcagtgcaggcaggctctttgggtcctggaacactttacattttgtaggacaatgcaccggcagcctggctccttggctgctttcccctttgtactcccttcatgcagcttcagagagctgggatattagcgaacggcccctaccctgtgttacacaacagtaccctcgtcctctccgcagccacagagtgaacctgtgacccttccaagcctggggacctcccagtgtcacactaatagggcttcttaattctgagacatacagtagaagaaaagttgaaggacattttctgtttgcctattctgaaactctggaacatgtgaatgtaggggatacaagctcagtagcagaatttcaaaagggctcattgtgttcaaaagctttctcctgaactcagtttagaccagtaagtgatcaggcatccacaagtgatttttgccacaataaacccaaatgttatgtttggggctttttaaaatccttccattggattgaagcacaggctccctgtgtgtatcattggcgcgattatatggcttcttgatctccaggggtctgttgctgggcctgggcgggtccccaggcttggtggtgacatatgtaggttgacgcttctgttgtgactcctgtggtctacttctgtcctgcatgggatatgggagttgggggatttttatttctctgtaattaagtggtgactaactttcttccttgaaattacagactaaatgatggcaatgagtacctcttccaagccaaagacgatgtaagtttctaaatgttatttctctccactacttaggagtttgcaagtgtttgtgtgatgatgggctttattcagaaagttcttcatgtaaatgatgatcagtgatggtttctatcactgggctccagtcaccagcactagaaggtgtttggttctgtctctagaaggcagtgaatatgatctcactgtccctttgccgaggcaggatcccttaaagtcgatggaatctttgcctgtcccctcccagggatgaggcatagtgaggtggtcccaggactggttgtggatcatgatgggacccccgctgcacccttcgccagcagccagctgtttaatgggtgtgtacctcacctcaaggaaagagagagtccattgatggaaaaacaacacctgtaatgctttaaatgtgaaaaagcaccttctagggtgggatctgaccacctcacagattgagactggtcttccagctgttacaagtttgtagggccacatactagggtgatgagtagaactgaattctcatgagaagctgaaccaggttccctctcctgtactgataaggcagaggtgcatttggggacagtgcccagaagtgactctgcttacccctcagttggccagatgcgccattcccaagccttggagccagaacccctcatgcctactcttagttgagtctcacctgtgtcccttcctctgtccaggaggaaatgaacacatggatccaggctatctcttccgccatctcctctgataaacacgaggtgtctgccagcacccagagcacgccagcatccagccgcgcgcagaccctccccaccagcgtcgtcaccatcaccagcgagtccagtcccggcaagcgggaaaaggacaaagagaaagacaaagagaagcggttcagcctttttggcaaaaagaaatgaactcctttccttcacctcctgcccttctcttaccttttcagtgaaattccagcatgcaagctcagaaccaacacattactctctgtgcctaatgttcctcaatgtggttgatttttttttttttttaatttatagagcatttcggggggggtgggggaaacacacctaaacactttatctccaagttacaaaagtttgaggtgcagagggaaggccagattttttttttaatgaaattatatagattagatctcagtatttaaactgttcctcaattttgtgaggctgtgttggaaataacccgcctctagtgctgttggtatgcaaggcagcggtgcttaatcaatatttcctgtgctcaccagaggcaaaatgtaccaatatcctgacaccattctctctccatttacttctggtggttaccctgactcttgactcttagaagtgcccgagatggggctaacctttattaaacagatcgcatattatgatcttgctgcagccacagtgcagctccacattaactctacagaccaaaccatttgtatctggcatcacttactaacacacgacatgcggcttttctgcatcaactgctatgacggttaagaatgtcagtatacaagaaggaatagaaaactgatactgttttaaataatctgtaatttcaattttttttttttgctgaaatacattatattgtacgtttgagataattctagtacaaagtataataaaactagatgtataataaaccctttaaatcattggtaagtgtacaagtggtggaactgaagcatttactggacaaagtaatgttactctaatggttacttgctcgtgcgttgccacactgtgttataatttgcttcatttccttgctatttgatacatagtgtgcatttctctgtcactgtaactattgtaatgacaaattttcatcttactgcacaatcaaaatgacattgataggaatgaactccagaggctgggcctgaacagggaggtggtcgctcaggcctggtgctcagtcgtacgacctgtacctctcaacttttgccctatctgttaaatatatgctatgtcattaaatgcttttaaatctagcacggtgactagttgttgttcttcctctgctgcgtgtgcatgcccagtagggaaactgcaaagggagaaatgacaaacaagaaacattttacaaccagtctgggctcacttttgcattttttatgcatgtctggtgcacaagctttgaaaactacagcaaacagtaataaatgtgactgttttgtagttatacattcaggctttatcttttatttatgaaaaagttaccagagcacttgtgaaacctgaactctgagataggggttggcaaatttgttctgtaaagggacagagatagtaaatattttaggctttgtaggccgtaactgtctctgttgctcaattctgctgttgcgtaatacaaaggcagccattgacggtatgtgaatgcctgggcatggctgtgttccagtaaaactatttaaggacataaatttgaatttcatataactttgacatgccatacaatattttgattttcttaatgatttcaaaatgtaaagtctattttatacagatcagaccaaaaagaagaaaaaaaaaaaacaggcaagaggttaggtttggcccatgggccatagtttgctgacttcagcatagagtcgtgggttatttacaagtgacatacttttcctgggttatctgggtatgttgactccatgccacttgcataaagcagcaatggatattagtattatggatgtccagtaagttattccacaaagaccatgcctaaggtggcatcagccctgggctccacagctgcgtggcatcaaagctttctcttaactctcttacctctaggcaaactgagacctcaccatcctctcccctgcttcccacgacagtcctttgcccttgccatgctcagggttggaatcaagttgttctattctcaacagaccaaaatgtttagttaaggcaaagtatcttggaaacaattgtgattaattacagtcttgtactcttgacaaagctgtgcagatggcaataagttcataccagcaatcctggagtcccataataaatacgtacatgtggaacatcgtgcacataatttcaacagttcgcagatctgtagttatgaagccagggtttggtggtatttgctctctcttggtgcatttgataaggatccactgaggcctgaatgtggaagatgatgggcagcgagaggagcgtcagaagaccccagtcaagacgtgttcgccatcagaggttacaggccgcacagcctgatgagcttcaagcctggcagggtaaatagtttttgggttttttgttttttttttattcttccactatcatgttttttgaggattttgcatatttcttgttgccataatgctgtgctattttaccctgattttcagtgatacaatatgggtgacaatactggcccctccataaatctgaagagtaagaagtagtgaaaataaggcttaggatatgaaatggcgttgtcacttgaatcaaggccactttttgtcctacttgagcatctcaagttgggatgcatcttctgatggcacttccggaactggctgtggtttttttgggtgtaccgagagtgccagtgactgtgcttcttacaattcctggcatcttgagtaggtgaaacactgtatcagactgggtgatgggcacattgtcatttcaccaagttcctggaactgttagaattgcttgtgtatggggatcctatgttagttcccctggatacattgttttatcagtcggaattcttaaataaagacatacttcccttcatgtagtggtgcagtccatgtagaaaaggcaggatcaatgctggagtctttcccattatttgcattactttcctataatcagcgttatttatgagttggttcctatcctctaaagatgaacaattttttaaatattatgaatttatgggcttaaatatatttgagttttctggtgaaatcctcgttttttggtgaatatgttttataattttgaattgacctttctaaacatggtccataacacaaaaacatattttaacaaagaagaaaaaagacttctttccatcaaagctcaatagagatttctgtctattgaagatcatggtgaaatatttcattttccactagaatagtttaaaattattcatttgctttattccatgttataaaaactcagaatagcaatactaatactaccaccaccaataactgagaacagtttttttttttttttaactctttattttgcaatacttgtatactgacatgcagttgtaagaaataatacagtgctgtttacgcagtttcccccagtggtagcttgcaacactatatagtatagtatcacatacagaatattgacattcagtcaagatacagaacattcctgccaccacaagggtacctcctgttgcccttttataaccacacccacttcccacctccactccctccccaacctctggcagtcaccagtctgttctttattgctggaaacctgtcgttttcttcccctaacaaatatttattgagcacctacaatgtgctgagttttggggatccactgaaatttcttatctcaagaatgttgtataaaaggaataatgtaggatgtaacctttcaggattgacttttttctctgacgtaattctctgaagatttatccaagtaatattgtgtatatcaatagtgcattcctttgtgttgctgaataatattctgtggtatggatgtaccacagttttttagccattcacttacggacatctgggttgtttccagtttgggctattgggagtagaactatattaaacatttatgtttggggtttcctatgaacataaatcttcattaatctgggataaagaaatacccaggagtgctgagaagaattttgaaaaacacttattctacatggtctttccattctccccttcagccccatttttaggtagtttcacctcatctgcagtgtctgagcaagtaactcttactctctgcctctgagccctcattcagtcttctacaaatcttcatatatttaaccagccttatgtcattgtctcccattttggctgaagctcgttcccttggtatgcagggtgtgtgtgtgtgtgtgtgtgtgtgtgtctttcttgaacccgcctcccagttctctggatcaagtacttgaagtgctcttttttacttttcagaactgaataaagatttccctcggggagaaataaacgtgagcttcaaagtttttcaaggtttagacccaacttaaagaacacaggc

SEQ ID NO: 582 - DNA, 113217 bp, Homo sapiens
  source 1..113217: mol_type = genomic DNA
gagtccctccaagggagacagcagagtggggtcctgttggcctccacccttttggggcacgcagatagtcaatatcttcagcgtccccaaggcctgcaagggtggggccccatatctggaagtcccaggcccagctgggagttggtcaagtctgggctgtgggggcagggagtgctgggggatggttatccccttttctgccctctctcctggggcaactccaaattttcagccctcattgactttcccaggactgctgtccccaagtcttcactcatgtctctctgtgactccttcccattaggtactcgcagcaacctgaccccccaactttttcagtttccagcctggggacttgtggtggttaagagcatgagctgagttcaaatcccagtcctgtcagttaacagctgtgtgatattgggcaagtcactctctgggtctcagttttctcatctgtcaagtagggtgatactagttcccaccccattttgaaagctctcatgtgaagagacgacagagcaagcttggcttagtaaatcctctctgggagtgcgaacaaccaccaccacaaccacaataatgacaaccgcattgcataagagccctggacttacacacgactgtgccagtggagtcctcccggggctcccggggccaattcctctctggcttggactcacataaacttggatctcacatctttccccatttctgcccccgtggccacttgctttggcccctgagtcctcatacacctggctggggcgctcatggccccaatcagcctcggcccgaccccatggtgccccttcctaaagttctgcccgtctgtcccgtgacatgccccgcccgccccggctcatgcctgcttgcaccgcctgcgccagggtggtgagcccggtctggccagtggcgccgaagatcgcgatcttcttgacggccatcgtacgggatcgtgggggtgcaaggcctcagagtctcggcacgcgcgggaacccactggctgctgggcggtgctctctgccctactcaagccaggaacaacggggcggagctggctcgaagggccacgcctcagactctccgcccgcggctcaggtcaaggggcggggcctaacgcggatgggcggggcaggcgtcagcttgcattcgctcaccgtccagcaccgccctctctgcgcgccacttagactggaaggcggggccacagaaggccacgcctccacatagcaacaaatagagtggacggagccgagataacttgtcactcagcgccctgcctccgcgctccacctcccggagaggggcggggccaggcgagcctcacccacggcctctcgtagctcacgccccctctcccggagcctggagcggatctggggcgcactctaagccccagggcctcccagaaccagcaaggggagaaagttaggaggacagagtgtgtgtgtgcacttggatgtaagacactgtgtcacggcgtacctatgcacttatatgaccctgtgtgactcagtgacccggagggcaagcaggactgtgggtgacaccttgtgtcatcctctgagtgtgatcccgtgttacagtgtgactacacgtgcgtgacaccacgtgtggcaggcattgattctgttcttttgtgaccttgtggtgacaccgtgggtgacactgcgtcagcctgtacgatagggtgtgggacgtgtgaggtgtgctacatggaagcgtgagactaattagactgtgacagtgtgtgacaccacatgtctcgtgtaaggatgtgtgacaccgggaccccattcgagtgtgtggctgtgggtgtctgtgttgagctgctcattgtgaccccctgtgactatgatgtgtgaggtgcggcggtgcagcatgtgcggggcgactgctatgaaggttcgagtgtgtagagtgtgtgacactgtggctgtgaagctgtgcgtgatgtgtgggcctatgacactgtttgtgactgccggggagtgtgcggctgtgtgtgacaggtgcatttgtgtgtgacgccgcgtgggcggtggttaccctattggatttgtgtggtggtgggtgacaccgttccagtgtggacgccgcgtgtgacggcgtgagggtgtgaccccgtgagaccccacaggagggagtgacggcgcgcaagcgcgtggatgcgggggtgagtttgtgcgccgaggcccccgcgagtatggcagcgtggcgagcgtgaccccgtgggagtgtgcagcgcgtgacgccgccgtgccctcgcgagtgcagccgtgcaccccacgccgcggccgggtgtgactgcgcgtgggcctcgggcggcggggcgcggggaccgcgggcgggagggggtcccgggggcgcgctgagcgcggcggcggcgcgagagagggaggcgcggcggcgcatgcggatctggctgagccgcgggccggcggggccgagctgagccgggctgggccgggccgggccgggccgggcagcggacgccgacagggagggcggtcggtcgcggcgagcagcggagacagcgacgctggcggccgcgggcccaggtgagctgctaggggggccgacagcccctcccccaagtatgtccccacctggcgagcatccctcctccgcgcgcacggggcatggctggagccccgggtctccccggctggagggaggcaaagggtcgagggcaggacgagcccacaacccccccacccggtctagcttccgcgccacgcgtgggtcttacccccaggccttgtccttcccaggccccctccttgggcgcagtgtctggaccgcagggagagaggcgcggcctgggaagggttaaagcctctgatgccaccgcagcccagcgccccaccagcctttgcgggggggggggggtgttggggggaggctcgcaggacaccccttcccggcttccctattacctgctcccttccttcccattcaatcgcgttatggccagagctgatcctcggcctggccagagggctaacaggagtgctaagggcctccccatctctaagtgtcttccactgaagaaaacagctgtaaccaccgtttaacagggagggaaactgaggcacagaaaggccaagttaaagatactcggttaaagatacagcaagaataaagcggaacttgaactcatttctgtctgactccagaagaggcaaatcgatttgctgagatgtgtgaggaaaagatgaagaataatagcaaggaacatgtatcaagggcttgcagtgtaccagataccatgatccctgcattaataacttacctcttcaaacaccgctaagaaacgggtacgattatcattacttttttttttttttgagacggagtttcactcttgtcacccaagttggagtgtaatggcgcgatcttggctcactgcaacctctgcctcccgacttcaagcagttctcctgcctcagcctcccaagtagctgggattacgggcatgagctaccatgcctggctaattttgaatttttagtagacatggggtttcactatgttggtaaggctggtctccaactcttgacctcaggtgacccacccacctccttggcctctcaaagtgctgggattataggcgtgagccaccgcctggcctacccttttgtgtgtgtgtgacagagtttcattctgtcattcaggctggagtgcagtgagtcaatctcagctcactgcaacctccatcccccaggttcaagcgattctcctgcctcagcctcccaagtaactgggactacagacacgtgccaccacgcctggctaatttttgtattttttttagtaaagaccgggttttgccatgttggccaggccggtctcgaattcctggcctcaagtgatccacctaccttgacctcccaaagtgctgagattataagcatgagccaccgtgccgggccatcattactattttgcagatgaacaaactaaggcccaaagagtggaagtatttcagccaaggtcacacaggtggtaggtagctgtgtgctcactttcacttttccatggaaggagggaagaacaaaaatggatttgggactgggcacagtggctcacatgtgtaaccccagcactttgggaagttgaagtgggcaaatagcttgagcccagatgtttgagaccagcctgagcaacatagtgagaccccctctctacaaaaaatacaaaaattacctggtcatggtggagcttgcctctagtcccatctactcaggaggctgaggtgggaggatcgcgtgagcacaagagttggaggctacagggagctatgattgtgtcactgcactctagcctgggtgatagagcaataccttgtctcagaaaaaaaaaaaagatttcaatgtgtccccctaagggacaatttccactctactcactctactgaccaagacttagaccctgccttcctagaattcagtgggttggcaattgtctgggtcttttgaggacattgatctcccaacttcctcctttgttagtcttttttttttcctttttcttttgagaaggagtcttactctgtcgcccaggctagagtttagtggcacaatctcggctcactacaaccttcgcctcccggtttcaagcaattctcctgcctcagcctcctgagtagctgggattacaggcacctgcaaccttgcccacctaatttttgtgtttttagtagagatggggtttcaccatgttggccaggctggtcttgaactcctgacctcgtgatccacccgcctcagactcccaaagtgctaggattacaggtgtgagccaccacgcccagccgttagtcttagaatcaggcctgggggcccagaaggtaaaggagatacatctaatgtcacttaaccctttaaatttcttctctttttttttgttttttttgagatggagtctcactctctcacccaggctagagtgcagtggtgcgatctcggctcactgcgacctccgcctcctgggttcaagcaattctcctgtctcagcctcctgagtagctgggattacaggcatgtaccaccatacccggctagtttttatatttttagtagaggcggggtttcaccatgttggccaggctggtctggaactcctgacctcaggtgattcacccaccttggcctcccaaagtgctgggattacaggtgtgagccactgtgcccggccaatttcttctttttttaaataattttttgttttctatttttttattttcatttaatttaattttattttttctgagatggggtctcactctgtcgcccaggctggagtgcagtggcacgatctcagctcactgcaacctctgtctcccaggttcaagcgattctactgtctcagtctcctgagtagctgggattataggtgcacaatgccatgcctggctaatttcttgtattttagtagagatggagtttcaccaagttgcccagactggtctcgaacccctgagctcaggcaatccacccgccttggcctccctaagtgccaggataacaggcatgagccaccgtgcccggcctatttttatttttttatttttgtttgagatggtgtctcgccctgttgcccaagccggagtgcagtggtgccatcttggctcactgcaacctctgccttcccaggttcaagcgattctcctgcctcagcctcctgagtagctgggattgcaggcatgcactaccatgcccagctcatttttgtatttttagtagagatggggtttcaccatgttggccgggctggtcttgaactcctgacctcaagcgatctgcctgccttggcctcccaaagtgctgggattacaggtatgagccactgtgcctgccccctccactttaaatttttcttcttcttcttcttctttttttcttgagaatgagtcttactctgtcgcccaggatagagtgcagtggcacaatctcagctcattgcaacctgcgcctcctgggttcaaacgattctcctccctcagcctcctgagtagctgagattacagtagcccgaaaccacacccagctaatttttgtattttcagtagagaccgggtttcaccatgttggccaggctggtctcgaactcctcacctcgtgatccgcctgcctcggcctcccaaagtgctgggattacaggcaggacccactgtgcccagccccattaatgcaaatattctatcaccttttttttttttgagacggagtcttgctctgtctcccaggctggagtgcattggcatgatctcggctcactgcagcctccacctcccaggttcaagtgattctcctgcctcagcctcctgaatacctgggattacaagtgtgtgacaccacgcccagctaatttttgtatttttagagacagggtttcaccatgttggccaggccggtcttgaactcctgacctcaggtgatctacccatctcagccccaaaaagtgctgggattacatgcatgagccaccgcgcctggccctatcatctatgtttgaatcctagatactaactggctgtgtaaccttggaaaaatagatcaactcctctgtgcctcagtttcctcctctgtaaaataggtgtaataatagccaactgttagggaattaaatttgtggaaataataagagaaggtacatgaagtactgaccacagtgcaagtgttcaatatgttcattattgttattactgcattacagaactctattgttctaataataacagtgacaatttgctgagcccttaatatgtgccaggggctaagccatgtgttttatcacatcctgtgaagtggtgagggtgaacattattattattattatttagaaatagggtatcgccatattgcccagtttggagtgcagtgtcactattatagatcactgtagccttggcttcttgggctcaagccatcttcctgcctcagcctcctaaatagctgggactacgggtggcaaccaccacatttggctaatttttaaatttttttaaaagacagtttctggctctgctgcccaggctggagtgcagtggcgctatcttggctcactgcaacctccacttcacaggctcaagccatcctcacacctcagcctcctgagtagctgggattacaggcacgttgccaccacatccagctattttttttttttttttttttttgagacagagtttcgcttttgttgcccaggctggagtgcaatggcatgatcttggctcaccacaacctccgcctcccgggttcaagcgcttctcctgcctcagcctcccgagtagctgggattacaggcatactccacctcgcctggagaattttgtatttttattagagacagcgttctccatgttggtcaggctgatctcgaactcccaacctcaggtgatccgcccgcctctgcctcccaaagtgctgggattataggtgtgagccaccgtgcctggccaatttttgtatttttttgtagagacagggtttcaccatgttgcccaggcttgtctcgaactcctgggctcaagcaatccgccctcctcagcctctcaaagtgttgggattataggcctgagccactgcgcctggcttatttttatttttatagagatgaaatcttgctatgttgcccaggctggtctccaacccctgggctcaagcgattctcctgcctctgcctcccaaagtgctgggattacaggcatgagccactgtgcctaggccttatcattgttattatgtccactttaaagacagagaaattgaggacaagagaggggacaggactcaaagccagtcactgttagaaatgagacttgatcctagacctaacctacctctccctatgtccaggcctcaccttccccgatggcgcaggtaccaggggaagtggacaacatggagggcctgcctgctcctaacaacaaccctgctgcccgctgggagagtccggatcggggctgggagcgggagcagccggctgcgtccaccgcagcggcctcgctctttgagtgctcccggatcaaggccttggcaggtacctggaggagggctggggtgggatgaggaggagggggaagggggaagggtgcccgagaaccttggtggctgggagggtgggaaaagagaccagcactgtccaatagaactttccatgatggtggaaatagtctatatccataatgtaccatataataatcactagtctctgtgacttttgaatgctagaaatgtggccagtgctatgtgacagcctttgagttttaaattttatttagttttaattaaatttatttatatatatattttttgagacagagtcttattctgttgccccggctggggtgtagtggtgagatcttgggtcactgcaatctccacctcaccggctcaagccatcctcctacctcagccccctgactagctgggactacaggtgcccgccaccacacccggctaattctttttgtatttttagtagacaccgggtttcactgtgtttgccaggctggttttgaacttctgatcttaagtgatccacttgctttggcttcccaaagtgctgggattacaggcatgagccactgcacctggcctggtgttttttttttttttttttttgagacggagtttcgctcttgttgcccaggctggagtgcagtggcgcgatctcggctcaccgcaacctccacctcccaggttcaagcgattctcctgcctcagcctccctagtagctgggattacaggcatgtgccaccacgcccagctaattttgtatttttactagagacggggtttctccatgttggtcaggctggtctcgaactcccaacctcaggtgatccacatgtctcggcctcccaaagtgctgagattacaggcatgagccacggcacccggcctgttttaattaaatttaaatagccacatgtggcttgtgactgctgtataggtcagcacagccttagagccttagaaatgtacagtcccagaatggtgggactctgtaagcatattcccttagaatcccgaaatgcagagccatcagatccttggaacttgaaatgtctaagagattcttagacctcttgaaatgaagacctctggcctggcgcggtggctcacgcctgtaatcccagcactttgggaggcaaaggtggacagatctcttgagtgcaggagttcgagaccatgttcgccaacatagtgaaaccctgtctctactaaaaataaaaataaaaaaaaaaattagccaggcgtggtggcatgcatctgtagttccagctatttgggaggctgaggtgggaggatggcctgagactgtgaggtggagattgcagtgagtcaagatcgcgccactgcactccagccccagcagtaaagcaagaacctatctcaaaaaaaaaaaaaaaaaaaaaaaaaaaagagctttggaaatgtgaaacgttatcatcacagacctaagaaattttagtcattgttccctaggatcataggcccttagaaactgaaactgtaatacacaggaacctttgggacttgataatactaaacctttggagtttccaattagaaatgtggatcttgagaaatctgacatagagtgaccaaaaccttcctgcttttaccaccgaaactctcagccttgggccaaccagtacagtgggtcaccctaccattttttttttttttttgagtcagggtctcactcttcacccaggctggagtgcagtggtgtgatcatggctcactgcagccttgaactcctggactcaagtgatcctcccacctcagcctcctgaatagctggaactacaggcatgcgccaccatgcctggctaattaaaaataatttttttttttggcgaagcatggtggcggatgcctgtaatcccagcactttgggaggctgaggcggatggatcacttgagatcaggagtttgagaccagcctgaccaatatggtgacactactaaaaatacaaaaattagatgggtgtggtggtgggcacctgtaatctcagctacccaggaggctgaggcaggagaatcacttgaacccgggagatgggggtttcagtgagctgagatcacaccatttcaatccatcctaagtgacaagagcttaactccgtctcaaaacaaaacaaaaaaatttttttgtaagatggggtcttgctatgttgcccaggctggtgtggaactcctgggctaaaataaccctcccacctcggcctccgaaagtgctttgattacaggggtaagccagagtgcctagtagtcaccctactttgatgtatcagaacaatattagcaaagaccagagaactttatagttatagaaagaccttagacctttagaactgtagacccttgaaccttagtacttagtattcatagaggtctggaaccttagaagtgtttaatcatcagcattaaaactggcaaagaccctgaggagcctcagagatatggaacgtcataatcataagcctttaaaacatgacaccctagcacctttgacccttgggaccttaacatcttagaaacacggagcgctagaatcataaaatatagatgatcataatcatgaattcttaaaacccaaaggtcagaatcagttccctccaaatcttagaactttagtaactcagcagtttataatcacaagatggatctctgatactaagatttttggaactttatttatttatttatttatttgaggtggagtctcactctgttgcccaggctggagtgcagtggcgcaatgtcagctcactgcaacctccacctcccaggttcatgagattctcccgcctcgggagtcccgagtagctgggactacaggcccgcaccaccatgcctggctaatttttgtatttttaattgaggcggggtttcaccatgatggccaggctggtcttgaactcctgggctcgggcaatctgcccaccttggcctcccaaaatgctaggattacaggcatgagccatggcgctggctcaagaaacctggctgatctagaaacctgtagtcccagcactttgagaggccgaggcgggcggatcgcttgagcccaggagttcgagaccagcctggccaacatggtgaaaccccgtctctactaaaaatataaacattagccaggtgtggtggcgcatgcctgtagttccagctagtcaacaggctgaggtgggagaatctcctgagcccgggaagcagaggttgcagtgagccgagattgtgccactgcactccagcctgggcaacaggttgagaccctgtctcaaaacaataagaaacctggttaggcgcggtagctcacgcctataatcccagcgctttgggaggccaaggtggggggatcactggaggttgggtgtttgagaccagcctggccagcacggcaaaaccctgtctctattaaaaatacaaaaattagctgggtgtggtggcgcgtgcctctaatcccagctactcaggaggatgaggcaggagaatcgcctgaacctcagaggcggaggttgcagtgagcctagatcgtgccattgtactccagcctgggcgtcaatagcaaaactctgtctcaaaaaaaaaaaaaaaaaagagagagagagagaaatctgtatatgccacaaagtatgaaccagattcaactggtggattgccagctttgtctgatctagaaacctagactgatgaaaacatacactcatggaaacttacagtcatacttttagagccttagaaccttaaaaaggtaggaacatatcaacttagaattctagaatttactaatttagtgtaagtgagtttgtttttagttttgtttgtttgtttttgtttttgagaaggagtcttgctctgtcgcccaggctggagggcagtgacactatctcggctcactgcaagctccgcctcctgggttcatgccattctcctgcctcagcctcccgagtagctaggactacaggcgcctgccaccatgccccgctaattttttgtatttttagcagagatggggtttcactgtgttagccaggatggttttgatctcctgaccgcgtgatctgcccgccttggcctcccaaagtgctggaattacaggcatgagccaccgcgcccgtcctgtttttagtttttgtttgttttttgaggaggagggggtctctccatgttgcctagacaggtctcaaactcccggtgtcaactcatccttctgagtagctgggattacagatgtgtaccaccactcccagctgtagaatttattattattattattattattatcattatcattattattatttggactgctgccaggctggagtgtggtgataaaaatcatagctcactacaacctccaactcctgggcttgagcaatcctcccaccgtagcctcccaagtagctgagactacaggcatgcaccatcatgcccagctaattttcttattattttatttttttatagagacagggtctcgcaatattttccaggctgaacttgaactcctggactcaagtgatcctcccaccttggcctcccaaagtgttgggattacaggtgtgaaccactggaatttattttatctagaaaatattaattcagtgcctgctgtgtgcctggctcatgctggacaacatgaggggcatagtggtgactgaggcagcctgggtcctgcccccacaggactcataggtcagtgagagagagagatccggttagacaatgatgacccagaggggtcagagacagggtaggggaggcacaggcagagaggttggggctgttgacagaaaggcacaagcatcaggctgtgatggggaagcccaaggactgtgggagcccataggatgtacttgatccagcctggagaatcaaggagggcttcttggagaaggagaggcctaacttcaggcctaaaggatgaattggcatgaacactggagtgaagagtggaagagtattctaggtagagggaactgcatatgcaaggcctccagaagctgggagtggcttgactgagaaggatacaggtgaggagtaaatgatgatgggagaggagccagtggaagccagatcctttttttttgagacggagtttcgctcttgttgtccaggctggagtgcaatgccgcagtctcggctcactgcaacctccgcctcctgggttcaagcgattctcctgcctcagcctcctgagtagctgggattacaggcgcctgtcaccttgcctggctaatttttgtatttttagtagagatgggggtttcaccatgttggccaggctggtctcgaactcctgacatcaggtgacccacctgcctcagcttcccaaagtgctgggattacaagcataagccactgagcctggcagaagccagctcttaaagggccttgcggggtaccagggagctatggaaagattttaagcagaggtgggaagattttaagcagaggtgggatatggtaagatgagaattaaggactctccaaatcttagaaccatgcttctgagagcatcttgcccagggaaatgtagaaatcccctttaagataaaaaaaaaaaatcctctccagtttgggcaacaaagcaagatcctgtatgcacaaaactttaaaaattaactggccacagtggcatgtgcctatattactctggaggctgaggcaggaggatcgcttgagcccaggaattgaaggcagtgatctatgatggcaccactgcattccaaccttccagcttgggcaacagagtgagatcccaccttaagaaattttattttattttattttttttgagacagagtctcgctctgtcacccaggctggagtgcaatggcacgatcttggcttactacaacctctgcctcctgggttcaagctgttctccttcctctgcctcccgagtagttggtattacaggcgcccgtcaccacgcccagctaatattttgtatttttagtagagatggggtttcaccatgttggccaggctggtcttcaactcctgacctcaagtggtccacctgcctcagcctctcaaagtgctgggattacaggcgtgagccacgcccggcctgtatgactttcataaatgctcacaaatgcacaactctgcttaaatctcccatgcttagggttcacatatagctctacaagtaaaacacatttatagaggaactccagaccccaaaccagtaacattcagcttaatagtaacttcatgatgctgctctcctgctgaaaccaccttgccactcaaagtgcaaatatgacgtagaccactacgctgcatttcttttgcatccctttgcccagctctctcatggtttttctcccgcttttattttgaggcagagtctcactctgtcacccaggctggagtgcagtggtgctatcacggctcactgcagcctcgacctcccaggttgcctgtaatcctagcactgaggctgagatgggagcatcacttgagcccaggagtttgagaccgacctggacaacatagtgagaccctgtctctatcaatgttttcaacattaaggaaaattgtttggaccccacgttcagtgtgttctcctactcaccctccacagtttgtggctcactactgtcattgatctgtgtgacgcctctctccaattctcttttattcccaaatctcaaatcaatttcttctcccctgtaggcaaccactgacattgttttgttttgttttttaaataaagatggggtcttgctatgttgcctaggctggtcttgaactcctgggcccaagcaattctcccacctcgacctcccaaagtgttgggaagccactgcttctgaccccattcagatagtttttaatgtgaatctttttctttgcatgagaataattttgcaaaatgtgcattgctaatgagtaagcatatatatatatatatatatatatatatttaactttttattattaaagtagttcatgacacagaatggcagataaatcatgccaatatttccacaaatgagtactctcttgtaaccagcacccatattaaaaaacagaatatacaatggggtgtggtgactcatgcctgtaatccgagtgcgttgggaaactgaggcatgatgatcacttgaggccaggagttcaagaccagtctgggcaacatagagagaccccgtctctacaaaaaaaaaaaattaaaaattagctgggtggggccaggcgtggtggctcacgcctgtaatcccagcactttgggaggcagaggcggatggatcacgaggtcaggagattgagaccatcctggctaacacagtgaaaccctgtctttactaaaaatacagaaaattagctgggcgtggtggtgggcacttgtagtcccagctgcacgtgaggctgaggcaggagaatggtgtgaacctgggaggcggagcttgcaatgagcggagatcaagccactgcactccagccggggttaacagagagagactccgtctcaaaaaaaaaaaaaaaaaaattagctgggtgtggtggcatgagcctgtagtcctagctactcaaaagactgaggtgggaagattgcttgagcccgagttccaggctgcagtgacctaagaaggtgccactgccctccaacctgggcaacagaatgagataccatctctaaaaaacaaacaaacagaatgtgacatatgacagctccagaaaagcatcctcatgccacctccctatcactacagtccaagggtgtactctcttaacttctaacagctcagcttcattttgctggtgttttaactttctgtaaatggaataatgcattgtgtgttgttttatgtccggcattattcactcaacattatgcttgtgggagattcatccatgtctccctgtgcttgtggggtggtccttctccttgctgtatagtgttgcgtggtgtgaatgtaccacagtgtgtttgtgcattcacctgttgataagcatttgggttgctgctagtttggggctactataaatggtggtgttgggccaggtgtggtggctcatgcctgtaatcccagcactttgggaggccaaggcaggcggattacttgagtccaggagttcaagaccagcctgggcaatacagtgagaccccatttctactaaaaatacaaaaaagtttgctgggtgtggtggtgcatgcctgtaatcccagctactcaggacgctgaggcaggagaatcacttgaacccaggaggtggaggttgcggtgagccaagatagtgccactggactctagcctgggtaacagagtgagactctgtcttaaataaataaatacataaaataaatggtggtgttctcaagtttctagtacacatatttggtggacatatgcgcttgtttctggtggtttacacccacgcaggagtgaagctgtccaatcatagagtaagggtatatattttattttacatatatatgtatctgttgttgttaattgagacaaggtcccgctatgttgctcaggctggtctccaactcctaggctcaagcagtcctcctgccttggctgcccaaagtgtttggattacatgtgtgagccatgcgcccggccaagtgagtgcatatctaactttagtagagactgcccgtttgtatcgttttatattcccactagcagtgtaccagagattcagttactgtgcaccccacccttgcgatggtcaggttttttgttttgttttgttttgtttgagacagagtcccactctgtcgcccaggctggagtgcagtggcgcgatctctgctcactgcaacccccgcctcctgagttcaagcaattctcctgtgtcagcctctcaagtagctgggattacaggcgcacaccaccacgctcagctaatttttgtatgtttagtagagacggggtttcgccatgttggccaggctggtctcgaactcctgacctcaggtgatctgcctgcctcagcctcccaaagtgctgggattacaggcgtgagccaccatgcccagctgatggtcagtctttttaattttagccattttggtggctgtgcattctgttgtggttttactttgcattttcctgatgactaagaacaacgaagaaggtgaagcacattttcatacatttattggccattcaaatatcctttagtgagatggccattcaagtcttttttttttttcttttgagatggaatcttgctctgttgcccaggctggagtgcaatggcacgatctcagctcactgcaacctccgcctcccaagttcaagcaattctcctgcctcagccttctgagcagctgggaatacaggtgcccgccaccacacctggctaattcttatatttttagtagagatggggtttcaccatgttggccaggctggtctcgaactcctgacctcaggtgatcgacccacctctgcctcccaaagtgctctgattacaggcgtgagccaccatgcctggcctgatttttaattttttatacaatggggtctggctatgttgccaaggctggtgtggaactcctggcctcaagcaatcctcctgcctcggcctcccaaagtgctgggataatgggcatgagccaccatgcctggcctgatttttctattcctgattacagtcttgttagcatggagcaagagttgagaactgaaatgcccaccaagaccagacgggctgcatacactgagagaactgggacctcctgtaagagggcagcggccacatagctcccgcgatggcagcctggcaggaatggaggtccagggttgccgtatcatgtgatatttcatgagaagcccaaaatctaaattttttaaagacaaagtcttcctattttaaaatgttggcaactgatttacatttttataaaacgcagtcggggtgcaaccaaatatatctcagaggctgggcgcagtggctcatgcctgtaatcccagcactttgggaggctgaggcgggcggatcacctgaggttgggagttcgagaccaacctgaccaacatggagaaaccctgtctctacaaaatatacaaaattagccgggcctcgtggcgcatgcctgtaatcccagctactcgggaggctgaggcaggagaattgcttgaacctggggggtggaggttgcaatgagccaagattacaccactgcactccagcctgggagacagagggagactccatttcaaaaaaataataataaataataaaataaataaataaaatatatatgtatacacacacacacatagacacacacacccctacctctctcaagtatgagttcccaaaatcgatgatcccccagaatccactgaagaaagccaaatctagtccaaatccctctttttgcgaatgtgaaaactggggtcccgagaggggagatgacctcgagaagtcacctggccagttattagtacagacagggcagaacccagttgtcctcattctggtaccactctagggatgcactaaaattccactttggctttagtactagccaaaacctgctatttggcatgggcatcatctgttagaaggcagaggaataaatcctcaatttaaaataattaaaagagtataattggattgtctgcaacacaaaagtatctatcccttaaatatatataactgctatgtacccactaaaattaaaaatacaattttttaaaaaaaatattgcttcttactctagcagtagaaaatatacatttacttatctgtattttttaactttaaattgcaccttgaatgtttacctctagtttgaaaacaaatatgcaaatattaacagtaaatgcaaaggaaatatcttgtttgtgtcagtgtgggttttgtgctgtttagataagatgggaccctatgtgaatactgatcatcaatcatacctgagaaagtgatggcagaaaagatgctaaattgaggatttattcctctgccttctaacagatgatgcccatgccaaatagcaggttttggctagtactaaagccaaagtggaattttagtgcatccctagagtggtaccagaatgaggacaactgggttctgccctgtctgtactaataactggccaggtgacttctcgaggtcatctcccctctcgggaccccggttttcacatttgcaaaaagagggatttggactagatttggctttcttcagtggattctgggggatcatcgcaaagctcttcgcaaagctgaggtggaacgatggcttgagcctgggaggcagaggttgcagtgagccatgatcttacatcaccgcactccagcctggattttatacagggcagaccctgtatcaaaaaaaaagagagaaaaacaagtacaattaaattattattgaatataatcaccctgttgtactgatatcaaatactagatcttactcattctttccatattttgtacccattaaccatcaccccttcccttaaccccactattgataatgttacaaaaggtaaattttatgaaaaaggaaattattgagagatttcaaatggttgaaggagaaataaactggaaatatacatctttattcctgaattaatggaaaacttaataggaaacttaatattatttagtaatgggattttaacagtaactgtacaggctaagctgccaacaaatcgacttcacagtacagtggcttaatggagaagctatttctccctcccagataacctcgagatgatcaacacagttggcaggaagacttagctcagagaggtcagtgtacattccaggttaatttcatcttgtattctgtagacattgaccttggttttccagtttatgggagtcaggggaagaaagaggaaggccaggcagcaattttctttttcttttttaaactttatttttggccaggcgaggtggctcacgcctgtaatcctagcactttgggaggccaaggggggtggatcacgaggtcaggagatggagaccatcctggctaacatggtgaaaccccatctctactaaaaaaaaattaaaaaaaattagccgggcgtggtggcaggtacctgtagtcccagctactgaggaggctgaggcagaagaatggcgtgaacccgggaggcaaagcttgcagtgagctgagatcgcgccactgcactccagcctgggcgatagagtgagactccgtctcaaaaaaaaaacaaaacaaaaaccaaaaaacaaaaaacaaaaaaaccactttattggcacccaccaccatgcccgctaatttttgtttttctggtagaggtggggtttcaccatgttggccaggctggtcccaaactcctgtcgtcaggtgatccacctgcctcagcctcccaaagtgctgggattacaggcgtgagccaccgtgcctggcctaaactttattatttatttattttggaggcagagtctcgctttgtagcccaagctggagtgcagtggcacgatctcggctcactgcaacctccacctccctggttcaagcgattgtcatccctcagcctcctgagtagctgagattacagatgtgcgccactaagtcctgctagttttttgtatttttagaagagacagtgttcgagaggctggtctcgaactcctgagctcaggcaatccacctaccttggcctcccaaagtgccagaattacaggtgtgagccaccatgcccagcctttttaaaactttagattatgaaataattacacattcataggaagtcgcaaagatagtagagatgataaaaagacatgtaactggctggttgtggtagctcgagcctgtaatctcagcactttgggaagcgtacgtgggaggattgcttgagcacagaaggttgagaccagcctgggcaacatcgtgagacccttgtctctacaaaaataaaaattaaaaaatcagatgggcatggtggcatgtgcctgtaaccccagatactcaggaggtgggaggactgcataagcctgagaggttgaggctgcagtgagccatgattgtggcactgcactcaagcctaggcggcagagtgagattgtgactcaaaaaaaaaagagtaatcctactaaaaaatgtccaagggattttaatgacgtttctccaaagatatacaactgtctgatggagcatgaaaagatgctcaacatcattagccattagggaagtgcaaaagaaaaccacagtgaggtacaacttcacgcccactaggatggccataaaaaaaaaaaaaaacagtagagggaaatgaccaagcgcagtggctaacacctgtaatcccagcactttgggaggcctatgtgggtggattccttgagcccaggagtttgagaccagcctgggcaacatagtgagacccctgtctccacaccaaatacaaaaattagccaggcctggtggcatgctcctttggtcccagctacttgggaggctgcgatgggaggatcacctgaggctgggaggcagaggttgcaatgagccaagattgcaccattgcattccagcctgggcaacgtagtgagacccccgtctcaagggaaaaaaaaggaggggttgggaaacagcaagtgttggcaaggatttggagtcctcacacattgctggtgcagcaacttttttttttttttttgagacagggtctggctctgtcacccttgctggagtgcagtggcatgagcacaggtcactgcagcctcaacctcccaaggccaagcgatcctcctgcctcagccactcaaggagatgggactacaggggcattccaccctgcctggctaattttttgtatttttttgtagagacagagtcttcaccatgttccccaggcaggtctcaaactcctgtactccagcaatccacccgccttggcttcccaaagtgctgggattacaggcatgagccaccatgcctggcctatggtgcagctactttggaaaacagtttgacagttccttaaggccgggcgcaatggctcatgcctgtaatcccagcactttgggaggctgaggccatggctgtatttatccgtgtcctctctgaactgagctctgtgagggccctgctgtattcacagagccttgaacaggcacagagtgtgcattcgaatatttattgaatgaatgaatgactagagccaactggggtcacaagcagggaaggcttcctgtgcaagtgacatgtcaggaaaacttcaagggacaggaaggttttcaccaggtgggtggcagagggtcggggaaggcgtcacaggtaggaggagacatgactgctgaggctggactctcttttttttttttgagaaggagtcttgccttgttgcccaggctgcagtgcagtggcgtgatctcggctcactgcaacctccgctccctggttcaagcaattctcctgcctcagtctcccgagtagctgggattaacaggcatgcaccaccatgcccggttaagtttctttttgtatttttagtagagacaggatttcaccatattggccaggctggtcttgaactcctgactttgtgatctgcccgtctcagccttccaaagtgctgggattataggcatgagccaccgcgcccagccgactcactctttttttttttttttgagatggagtcttgctctgtcgcccaggccggagtgcagtgatgcgatcttggctcactgcaggctccacctcccaggttcaagcaattctcctgcctcagcctctccagtagctgggattatgggcgcccgccaccatgtccggctgctttttgtatttttagtagagacggggtttcaccatgttggccaggctggtctcgaactcctacctcaggtgatccgcctgtgaggctggactcttgcagagagctgggtctgagcaggcttggctcgcggagggctggggtgaaggtggaagcgcctgggggctcatcagggcctctcctccagatgagcgggaagccgtgcagaagaaaaccttcaccaagtgggtgaactcgcacctcgcccgcgtgggctgccacatcggggacctctatgtggacctccgggacggcttcgtgctcacgcggctcctggaagtgctgtctggggagcagctggtgagggggcctgaagggctggggcaggggtcctccctggggtctcaggctgggggttgggcttctctggaagggctgaactgcaagcaggggcctggctcatgggcgagtggaacgtgctggaagggccctgtgggtaagaggtccctctactcgggtgtgtggggctgtggcgctggggcggagcttggtcgtgagaagcctgggcgcgtggctggaaccgaagctgatggctcgctagctacggttgcgaggcggggcttcggtggaaggggccgggctctgttgcaaggggcagggctattagagaagggaggagctttgttagaagggactggcccgggttatgagctagtaggggcatgctataaaacaggggcagaactgtattgcgggttgggggtgggtagtggatgaaggtgcggggctctaggctagggggcagtgttcgttggtagggtgacacctaggtcgtcggtgtctagggacgcagacggtgtcctgggatgtggcttgttgtataaattggggctgtgtctctgggcttgaatggggtttcatctaaaagcgtgggattctcatggggtagagattcgttaaaggactggagcctggatctcaaggaattgtgaggggcatggctatggaataggaacaaacagctgggcgctgtggctcatgcctgtaatctcagcactttggggagccaaggtgggaggaacacttgagctcaggagtttcagaacagcccgggcaacataatgagacccccgtctctacggtttgtttgtttgtttgtttatttgtttaaattaaccaggcgtggtggcgcaggcctgtagtcccaagtacccaggaggttgaggagagaggatcgcttgagcctgggaggtcgaggctgcagtgagccatgattgcaccactgctctgcagcctgggcgacaaagcgagactctgtttctctctcttttttcttaatttttttattcttttaaatagatacgaggcgtcactatgttgcccaggctgatctagaactcctggactcaagcgatcctccagcctcggcctcccaaagtgctgggattacaggcgtgagccactgcaccgggcagagaccctgtctcaaaaataaataaataacccaagcgctgtggtgagacccgtttctacaaaaaatttttaaaaaatcaaaaagcattagctgggtgtggtggcgggcacctgtagtcccagctgctcaggaggctgaggcaggagaatcgcttgaacccaggaggcagaggctgcagtgagtcaagatcgcgcgactgcactccagcctgggcgacagagtgagactccgtttcaaaaacaacaacaaaagccaaaaaaaaaaaaaaagaaagaaaaaaaagaatagataggaaccaacgctgttggaaggaattgagccataaacaaggggaagagcactggggcagggcggagcttgattgggatgggcgtggttctagctagggacccgaaagggaagcagcgaggggtgtgacgcggagtttttgtttgtttgtttgaaacgaagtctcgctccctcacccaggctggagtgcagtggcgcgatctcggctcaacagcagcctccgcttcccgggttcaaaggattctcctgcctcatcctcccgagtacctaggattgcgggagcgcgctaccaagcccggctaatttttgtatttttagttagaggcagtgtttcgccatgttggtcaggctggtctcgaactcctcgcctcaagtgaaccacccgcctcggcctcccaaagtgctgggattacaggattgagccactacgccggggcggccatgggattagtggcaaaacattggtagagagggatccaatggcagggccagggctgagactatgggctaggagggcggggcttcatgatgggggcgtggttatcaggttcgaagtggggcgcccgtggaaggggcagagccagggacgtgaataaaccttgaagggatgtgattctttaaagggtctggctatgggaagagacagagcttctttagaaggattgagtcctgtgtcttggataaaacgagaggaggacagcctgatcctggacactcagggggcgtggccacgggaggcgggcttctttggaagctgcggggccgagggcgccatactcctgtctgtccagacccccgatcgcccaccgcccctgtcgccctagcccaggcccacgcgcggccgcatgcggatccactcactggagaacgtggacaaggcgctgcagtttctgaaggagcagcgcgtgcacctggagaacgtgggttcgcatgacatcgtggatgggaatcaccggctgacgctggggctggtctggaccatcatcctgcgcttccaggtgaccctcgagtggcccctgccaagccccgcaacatgggacttaggaaagcgttccccaccatttacccattcattctttccttccaataatatcctaatatgctggaatcctattccaggtgttagggatgaaaataatgataaaaataattgtcacgatcaccaccatcacgataatcattttgtatcgaccctgttccaaacactgttctaagcacttgacatttaatacacacagcaaccccataaattaggtactatttagtaccccattttaccagtgaggaaatggaagcccagataggtggtgtcatctgcccaagatcacatatacctgggtgttggagctgaaattcgaatccaggcaatcttgatccagtatagagacaaatagacaaaggtgtgccttttaggagcttacattgtggtgaggaagacagataataaatacataaatatgtaaagaagacatgtatggaaaaaggaccagttctagttagagaagtttaaaaagctatgcagggccaggtgaagtggcctgtaaacccagcactttgcgaggctgagatgggaggaacactaaggccaggagtttgagaccagcctggccaacataatgagaccttaaataaatttaaaaaattagccaggcatggtggtgcatgcctgtggtcccagctactcaggaggctgaggcaggaggatcacttgagcccagcagtgtgaggctgccgtgagctatgatcatgccactgcactccagcctagacaacagtgagaccatgacttaaaagaaaaaaaaagctacccagaaaaatacagattatgataaaacaagtaatagggatataaaatgtcagttggtggtgttgagattttagatatggtggtcagaagagggctgtctgggaagttgatggctgaatgacatacaaagatgaagagagaatgcattccaggcagggggcacagcagatgcaaagtccctgagatagaaatgagcttggcctgttggaaatacaggaggaagagcagagtggctagagaatgggaggcaacgggagacatggaggagctgaggctcaggggatggaaggggctaggtgatctgtgatgagtagtttggattttattctgtctgagatggggagaggttgcaacattttatcaaggggaggtgcatacaagtttagaaagatagatccctttggctgggcatggcggctcatgcccataatcccagcactttgggaggctgaggcaagaggattacctgagtttaggagttcgagcccagcttggccaacatggtgaaaccccgtctctactaaaaatacagaaattaactgggcttcatggtgcacgcctgtaatcccagcgactcaggaggctgaggcaggagaatgtgagccgagaccacaccactgcactccagcctgggtaatagatagagactctgtctcaaaaaaaaaaaaaaaaaaaaaaaaagtgaccgggcttggtggctcatgcctgtaatcccagcactctgagaggctgaggtgggtggatcacctgaggtcaggagttcgagacaagcctgacaaacatggagaaaccctatctctactaaaaataccaaattagctgggcctggtggcacatgcctgtaatcccagctactagggaggccaaggcaggagaatcgcttgaacctgggaggtggaggttgcggtgagctgagatcacaccattgcactccagcctgggcaacaagagtgaaactccatctaaaaaaaacaaaaacaaaacaaaaaaaaaaacaaagaaagatccctctgggttggaggtgttcaccaacattgggagctgagagcccagggaggaggatagagttggaccagggtgggactatggggaagcaacaaggggcaggtggggaagacactcagggagtggagtggacaggccttacgggaggggagagggagagggtgtccaggggaagactcagagctctggcctggggactagaggatgatggggctgccctgagacagggacagggagaaggagcaggtttgaggaacaccctgaggccagtttgagatgggtccagtggttatgggtccaggacattggagttggggatgttccaggtagatggaacagccagtgctaaaggaccaaggagggaggatgcttgtgattcaggaaaaaggccagcaggtatggagtggagtgagctgttgaagatgaggtcatcaacttactgatgggagatcatgggaacttttacttttaccttgaatgaaacagagatacggagggtgttgaaaagaggagcaaggatctgatttgagtgttcgcagggtccctctctctgccatgtggagaacacactgtggatgcaggagtggggagatcagcatgaaggccaccgcactagcctaggcaggagacggcagtgccttagaccaggaaagtggcccagatgctcagtttggaggctttcttggaaacagagaccgaagtcctaactgatcccctaattgtggatgtcctggccctcaggaattatcctcacactcctggacccccacccccagccagaagctgcctcccccatctcctctgtcacctgccaccttctctggtagcagatggtgagtggggggcattcgaagcctcaagctctccaggccctggtagccattttttgtatcttcacagattcaagtcatcaaaattgagactgaggacaacagagagacacgctcagccaaggatgctctgctcttgtggtgtcagatgaagacagctgggtaagcacccccaccaccttccttaggaggttaggcaagtggtcccctaacctctgcaattccttcccagacaagagctcaaggggcagcccatgtcctcagggtcaaaaagttacatctgaaactaaccagctggtaaataaaatatgtccacttctccagccttgactaataatccttcctaacatgctagaaggccaggttcaaatttattttgaacttgctctgtcacccaggctggagtgcagtggcatgcactgaatagctcactgaagccttgatctcctaggttccagtgatcctccctcctcagcctcccaagtagctgggactactgcaccccacccagtttcaaatgtagaactcttggcctcactaggcacagtgtctcatgcctgtcactttgggagaatgaggctaggactttgagatcagcctaggcaacatagcaagaccccatctctacaaaaagttgtggggttttttttgttgttgttgtcgttgttgtttttaatcacaggcatggtggcagacgtctgtagtcgtagcttctcaggttcccaggaggctgagatgggaggatcatttgagtccaggagttcaaggtgcagtgagctacgatcatgccactgcactccagcctgggctacagagcaagaccctgtcttgaaaataaataacaaacacataaataaataaacaaacaaataaataaaaataaaatagaactcttggactcctcagagaccaatgctggaaagaggtgaactgtccccagcctgctctcttctctctctcccccatcccatttcatcctacatttcaagagatctcacattcacctgtgtggaccctcagtgctatgtccaagctctggccaccctctcccgctgtgagcatctcccttctgcctcacagggcatacacaggaaagttcaaagtccttggtcgcttcagtgtggctgagctggtggcggggtggggtgcaggctctactgggaaggttccctttggcccccaactctctgccctgcagggagcagtaagacctgaaactcaattgtcctctgtagagcagctcctgggaggacggagggaggggcaggtgtgggatggaggtgggcttctctgactctcatccttctggctgtctgtcttgcaaaggagatcatggggacttttgccatctgtttctccatgtgtctatctctatatctgcttttccttgtacttatctcttctctcctccctccttccctcctttcctccttcccttttctcttcatgtcttctttctctctcctctcctttccctccccatctctgtctatatcttgctctctccctgtcttgatacctctctccttcctctctctctccttccctctcttctctcttctttcttttgcttctctttttctcttctctcctgctatctatcttctatcaatctatatatctatcatctatcaacctatatctattatgtatgtatgtatctatctatctatcttctatcaatctatatatatatcatctatcaacctatatctattatctgtctatcatctatcaatctatctatcacctatttatcatctatctatgtatctacctatctctctctctactcaccatctatcacctgtctatcatctatctgtgtatctacctatctctctctctacctacccaacacccacccatccatccatctttctatgttctaccccctctctctcatcttccttccctatcattcggtctccctctgtctttttcccctttcttccctcctaactctccccatctctgcctctgtttctcccttcacccttccagttaccctgaggtaaacatccagaatttcaccaccagctggcgggatggcttggccttcaatgccctcattcaccggcacaggtaccacctggcctgggacagcccagtcctgcccttcagccccccatatccctgcagctgcacacctgtacatgtacttgtgtagatggcacacacagacataaagacccatcccttcacctctacacacacatacagttttctttcccttcacacacatgccctgcacatttacacacaggaacacacacccacacaggctcctgtccaggccacataccctgtgcacacatggacacacatgagccctcgcacagatgcatacacacacacagatacccacgcacgtgcacagcctgcccgcagggtaggaagctcgctcccctgtcactgtcatgctgctgtgtacccagcacctcctcctatcagaaaatgctttctcaggccaggcgcagtggctcacacttgtaatccctgcactttgggaggccaaggtgggaggatcacctgatgttaggagttcaagaccagcctggccaacatggcaaaaccccatctctactaaaaataaaaataaaaaattagccaggtgtggtggtgcgcccctgtagtcccagctactggggaggctgaggcaggagaatcgcttgaacccaggaggcggaggttgcaatgagccgagattgtgccactgcactccagcctgggcaacagagtgagactccacccctaacccccccaccaccaccaaaaaaaagaaaagaaaagaaaacacttcctcaaagtgagcccttagagtccccgtccctgtacacccacggattcataccttggggcctgacattgaaatagctgagggtcagacacccacacaaattagacacacatcatgatcattcgcatgacatattggggaaactgagactcaggcgcaggaaggggcttgtggtggtgtagctgaagccagaacccagctttttctgctgtggacacctgtccactcacaatccctgcttctcacacctacacacactcgtacacacatggggagacccagacccacctccatacacagaaactcacaagctgcaccagggtcatcctcacactaggtgacattcgctcagtgttttctatgcacaggcactgttctaagggcttcccactaaaacattcaatagtcaatgtatccattcagtgtgtccgatccacctatgggcaggtgctatttttatttatttatttattttgagggtgagtctcactctgtcccccaggctagagtgcagtggcacgatctcggctcactgcaacctctgcttcccagattcaagtgattctcctgcctcagcgtcctgagtagctaggattacaggcgcccgccaccacacctggataattgttgtatttttagtagagatgaggtttcaccatgttggccaggctggtcttgaactcctgacctcaggtgatccacccacctcggcctcccaagtagctgggattacaggcatgtgccaccacgcccggctaattttgtttgtttagtggagatggggtttcaccatttgggccaggctggtttcaaactcctgacctcaagtgatctgcccaactcagcttcccaaagtgctgggattacagggatgagccaccatgcccggctggcaggtgctattattatccccattttagaggaaaccaaagcacagagaaacgcagtagctcacctagagtgacacaaccaggatatgaccaagctggggctcaagctctgatgaactggctctggtcctcacacttctaaccactgcataacactacataagaatccccaaagtaagcatatgtgtgtcagaggtacatgtgtcctggccagacgcagtggctcacacctgtaatccctgcactttgggaggcctaggcaggcagatcacttgaggtcaggagttcgagaccagcctggccaacatggtgaaaccccgtctctactaaaaatataaaaattagcagggcctggtggtgcacacctgcaatcccagctacttgggaggctgaggcaggagaattgcttgaacctcggaggcggaggttgcagtgagctgggatcgcgcccctgcactccagcctgggtgacagagcgagactccatctcaaaaaaaaaaaaaaaaaaaaaaagaggtacatgtgtcctcacacaacacacataagggctgtacacactcgtattgtcatatgatttcacagagacatacacaggcaggcaccgtgtgggctcatctcttccaagcacactcaggctggcctacccattcgtctgtgtgcacaggccggcccagcaacaaatgcacatgcacacacacattcccgggaacgcacagagacatgcccgcgtccatcacactcacatcacagctaaatgctgcacagcacacacagcttgccccttggctagactgtgcccttctgcccattgccctgggcagtgctcagacaagggtggcttcttccctgcttgcccgccggctctggagcctgcctgctgcctgcctgctctgtgcccctgcccaggcctgatctcgtggacttcagcaaactcaccaagtccaatgccaactacaacctgcagagagccttccgcacagctgagcagcacctggggctggcgcggctgctggatcctgaaggtgagcctctcgcgggcccagcccagacttcgtcttgggggactcccaaccccaatgccatgtcacactcaactccatcccaccccagcaccatcccaaatcctgaggcctctccaaatcccaactctttccaaatcccaactgtctcctcagcctcctccccttgtgcctccccttcctcatgtgcgatccctcccacataccatcctcacacctcttcctctctcatccccaaccgtgtcccaacgtaacccctcctcttccccattctcaatttccacccatccccaacaccctccccaaccctgctttcaaccatctcccactaaaccaactcccactcccctaccccagccccaaacccagtggcatctccaacgccatccccacccctaacgccaaccccatcttcaagtgtctccatccccaccacatcttcggctccaactccattcctatccccaccctaatccatttccaaactcatttcgccctagcccatccccatgtctatctctcccacaactccatcctcatcctcagctgcttttccatttccagtctatccctaatcccatccctgacttcagcctcagccccaaaccaggatcagccctgacacccatctcccatcccaaattaaagctgctcccttcctctgagctctactgtgtgccagacacatgtctgggaaccttatcagagctgttcactttcatcttcacactgacctggttagagagaatttatcaaccctgttttattttattttatttatttatttatttatttatttatttatttatttatttatttttttagatggagtctcactctgtcgcccaggctggagtgcagtggcatgatctcggctcactgcaagctccacctcctgggttcacaccattctcctgcctcagcctcccaagtagcttggactacaggcgcccgccaccacgcccggctaattttttgtatttttagtagagacggggtttcaccgtgttagccaggatggtctcgatctcctgaccttatggtccacctccttggcctcccaaagtgctgggattacaggcatgagccaccatgcccggcctatttatttaatttttgagacggggtctggctctgttgcccaggctggagtgcagtgccatgatctcggctcacagcaacctccacctcacaggctcaagtgattctcccatctcagcctcccaagtagctgggactacaggtgtgcaccatcacacctggctaatttttgtatttttagtagaggtggggtttcatcatgttgcccaggctggtctcaaactcctgacctcaggtgatctgcccactttagcctcctaaagtgctggaattataggtgtgagccaccgtgcctggacgttttatttatttattgttcttatgttcatttatttatttatttgagacagagcctcgctctgtcactcagactggagtgcagtgggggcgatcctagctcactgcaacctccgcctcccgggttcaagtgattctcctgcctcagcttcccaagtaactgggactacaggtgcacgccaccaagcctggctaatttttttttttttttgtatttttagcagagacagggtttcaccattgttggccaggctagtctcaaactcctgacttcaagtgatctgcttgcctcgtcctcccaaagagctgggattacaggcgtgagccatcacacctggcttacttatttatttttttatccaactgaatttaatatttaaaccctgtttaattattattattatgtttgaaatggggtctcactgtgttgcccaggctggagtgcagtggcacaatcttggctcactacagcttcaacctcctgtgctcaagcaatcctctcacctcagcccccagagtagctggggctataggcgtgcacgaccatgctcagctaatttttgatttttttttttttggtagaggtggggtctcgctatgttgcccaggctggtctcaaactactggactcaagcgatcctcccaccttggcctcccagagtgcctgggattacaggcccgagccacatgcctggcttaacctgtcttccaaagtgatgagaatgacagctcagggatgttgtcacttgcccagcatcacactgaaaatcaggaaaccagaccttatggctccagaattcatggtcttaatcagtcctctaccctgcctcttatagctgtatcctgtgctcagtgcctggtacgtagtaggtgctaatggatgtcagttggacaaggcagtgaagaataaaggccaggtatactgttgtgcatccagtgggtaaattaaaatgatatcactcagtcatggtgatggcttgtgcctgtaatcccagcactttgggaggttaaggcaggaggatcgcttgaggccagaagttcaggaccagcctgggcaatgtagtgaaatcccatatctacaaacctgtagtcccagctacacaggaggccaaggcaggaggatcacttgagcccaggagttcgaggctgcagtgagctctgattacaacactgcaccccagatcccaactcaaaaagcaaaaaacaacaaccaattaaagtgatgttagaatttgttgagtttcccctctgtgccaggctagtctttctaatacttacattgttcccaggaggcaggaaccatgataatctttattataacaatggggaaactgaggcttagagaagctaggttattttctaaggacatgcagtgagtaagtgttgaactgggatccaagtgcatgctgcctccaaagcctatgttcttgacatcaagccttgtgcacaatttgcaagctaactaaattttaatttagcacctactgtgtgctgggtaagacagaacagtgataaagaagataggcatacggctgggcccacgcctatagtggcccacgcctatagtcccagcactatgggaagctgaggcaggagtattgtttcagcccaagagttcaagactagcctgggcaacacagagagaccctgtctatgttttataaaaaataaaaagtctatttaaaaaattacaaaaaattagccgggcgtggtggtgtgtgcctgtaatctcagctacttgggaggctgaggcatgagaattgcttgaacctgggaggcagaggttgtggtgggccaagatcacgccattgcactccagcctgggcaatagcttgagactgtctcaaaaaaaaagaaagaaaaagaaaagaaaggaaaggaaaggaaaggaaaagaaaggaaacaggcatagtgtttgtcctcatgaagctcaagctctagataatgacataatcacataagtgaatatgtaattacaaattgtgatacattctgggaaggacatcataagatgctaagaggagaataacatgaggattatcaactatagacagagtgaacatggaggcttgtctaaggaaatttgagttgagccaggcatggtggttcacacctttagttctgactactcaggaggctgaggtgggaggattgcttgaacctaggagctcgaggctgcagtgagctatgattgcaccactgcacaatcagcctggacaagagagccagactccatctcttgaaaaaaaaaaaagtaaaaagttgagctctgaagaataagtgggaattaggaacacagaagaggaacagtgctccagacagtgagaacagcacatgcaaaggccctgaggtggaaggtagaaaggtgtgttcaagaaacaaatataggccaggtgcggtggctcacatctgtaatcccagcactttgggaggccgaggtgggcggatcacctgaggtcagcagttcgagaccagcctgaccaacatggtgaagccctgtctctactgaaaatataaaattagccaggcatggtggtgcatgcccataaccccagctacttgggaggctgagacagaagaatcacttgaacctgggaggtagaggttgcagtgagttgagatcgtgccattgcactccagcctgggcaacaagagcaaaattccatcttaaaaaaaaaaagaaaagaaaaagaaaagtatagcttatttctctgcggtggtttatatgtgtcaggcactatttaattccaggaggtagatttctatttgacggatacaaaacctgaggaacagagaggttaattatcttgcccaaggtcacacagctagtgagagtggcttctccatccctccatccaataccttcaagcactctgtcaaagtgcccactgtcttgtttccccactccctcttgcttccagatgtgaacatggaggctccagatgagaagtccatcatcacctacgtggtctctttctaccactatttctccaagatgaaggctctggctgtggaggggaagcgtatcgggaaggtataaggagccaaggagtgggtgagtgggaagctggaagctggtggcaggcacgggtgggatgaggctgaccccccttcctctgctgtgtcaggtcttggaccaggtattggaggtggggaagatcatagaacgctacgaggagctggcggctgagctgctggcctggatccaccgcaccgtgggcctcatcagcaatcagaaatttgccaactccttaagtggggtgcagcagcaactccaggctttcacggcctattgcacgctggagaagcctgtcaagtgaggcccagctctggagggagggtgggcaggggtggcatgacggcagggctcctgagctcatgccccttcaggttccaggagaaggggaacctagaggtgctgctcttcagcatccagagcaaactgcgtgcctgcaaccgtcgcctctttgtgcctcgggagggctgtggcatctgggatattgacaaggtgaggccggggatgcaggggagaggcggggttgcactgtggagttgtataggttgcacactgctcaagggaatcattcacattgtagacatgatggattagatattcattctgacagtttttcagtagtaaagtgtcataaggaagcaatattttttccaatttgcatgaagttgccataatgctatgagtgacctcagactaagtcaagaccattaaactgtggggagctgtcagagtctgagtgcctcctcccatctcctgcaggcatggggtgagctggagaaggctgagcatgagcgggaggctgccctacgggctgagctgattcggcaggagaagctggaactactggcacagaggtttgaccacaaggtggctatgagggagagctggctgaatgagaaccagcgtctggtctcccaggtacaaggtgtagggcttggctccagggtaaagggacggagggcggggctgatggtcctgggaccagagagggagacttgatcttctaggcaacagggaagagttagattagtctcctggtgataaatgaggatggggatgggagacttggccttccaagtgattgttgggtgaggggaatgggcctgatctccagggtaatgggagagtgaggctggtctccagggtaactagagagggcagaattcatcttttcaggaatgggggagtgttttaagtgacaagggaggttgtatcttgtgtctagggtaactcagaaggatagaattggtttcctaagtaacagagtcaggtaaacctggtccctaatctccaggacaggggaagcatgggcctccttcctgggtaacaagtttaaggttagagatgtaacaggagggtgggacttgtttccagggtaactggagagagtggggctggtctctggggaaacgggaaggtggggttggtctctagggcaacaggggagggtgggtctggtctccagggtaactggggaagattgggctggtctccaggacaacaggggagggtggagctggtctccaggataactgtggaagatgggctggtctccagggcaacaggggatggggggttggtctttagggtaactggggagggtggggctggtctccaaggtaacaatggagggtggggctggtctccaggttacctgggtaacaggggaggatgaggctggtctccaggataactagggagggcagggccagtctccaaggtaatggagtggggagtccccagggtcacacagggtcaaggtaacaggtggactgctgaggcagcatgggtgagtgtctggctcactgccccaggacaactttgggtatgagctgcccgcagtggaggcagccatgaagaaacacgaagcgatcgaggcagacattgcggcctacgaggagcgggtgcagggtgtggcggagctggcccaggcattggcagccgaaggctactacgatatccggcgggtggcagcccagcgtgacagcgtcctgcgccagtgggccctgctaactgggcttgtgggtgcccggcggacacgacttgagcagaaccttgccctgcagaaggtcttccaggagatggtgtacatggtggactggatggaggagatgcaggtgccggcgggggggcggggatgcgggtggagtgccaggagggaggggaggatgcagacgctgaaagagttgtcagacagctggagatggagagggaagggcagagatagaagaagatagagagaaagccagggagacaaaaagagagaacaagagagagagggagagaaagatacagagatggacaagagaggcagacaaagaaacacagaatgagaaagagacagagacaaatagagagaaatagaaacatgctggacacggtggctcacacctgtaataccagcactttgggaggccaaggagggcagatcacttgaggtcagcagtttcagaccagcctggccaacatggtgaaaccccatctctactaaaaatacaaaacaattagccgggcgtagtggcgggcgcctgtagtcccagctacttgggaggctgaggcaggagaatggcgtgaacccgggaggcggagcttgcagggagccgagatcccgccactgcactccagcctgggcgacagagcgagactccgtctcaaaaaaaaaaacaaaaaaaacaaaaaacaattagctgggcgtggtggcgtgtgcctgtagtcctagctatttgggaggctgaggctcaagaattgcttgaatccaggaggcagaggctgcagtaagccaaggtggtgccactgcactccatccagcctgagtgacagagtttgattctgtttcaaaaaaaaagagagaaatgaaaaaagacatagagatatagaaacagagtaaaccagggatgcagacagagagatagtgacagtttgagagagaggaaatcagagagacagagagaggagaaggcagacacaaaggtgacatggaaatctacatgactacagagaaagatacaggaagatggaatcaatttaagagagagagagagagacctaccagatctagagagagatgagacaagaaagatagaagccagctgggcatggtggctctcacctgcggtaccagcactttgggaggccgaggtaggcagattgcttgagccccagagtttgagaccagcctgatcaacatagtgagatcctgtctgtacaaaaaaaaaaaaaaaaaaaattagctaggcgtggtggtgtgcgcttgtagtcccagctactctgaagtgggaggatcgcttgagcccaggaggttgaggctgtgtgagccatgattgcaccactacacttcaacctggatgacagagtgagaccctgtctcaaaaaaaaaaaaaaaaaaaaaagaagaagccgggcacggtggctcacacctgtaatcccagcactttgggaggctgaggcaggcagatcatctgaggtcaggagttcaagaccagcctggccaacatggcgaaaccccatctctactaaaaaatacaaaaattagccgggcgaagtacatctaatcgggaggcaggagaatcacttgaacctgggaggtggagtttgcagtgagctgagatcgcgccactgcactccagcctgggtgacagaggcagactctgtctcaaaaaaagaagaagaaaaaagaatgaaagggaggaaggaaggaaggaaggaaggaaggaaggaaggaaggaaggaaggaaggaagaaagaaaggtgaacaggagacacagacaggaaggtgaacaggagatggagagaaagagaaaagggtagaaatgtagaaagagaggcagagaaagatggagacaaagatgtatagataagaaagacatggaggcagagagtgagccactgtgacagagacagagcccagaaatgtggagtccacgagagatggaaacattcagagagagactggtagagagagagggagacagagacagaacaccatggctagctgtgagagctgacagcagctggggctcagcttttttctttctgatgaggaaaccgaggtccaggccacagagctggtaagagagtcttgaggctggtccatatctctccaagagggtcagagtcgggagtgatggtgcagagtagcaggggctggcataggcaatgggggagaggtgagtggcccagggcagtgccagaggtgtgctcagtgctgtccccgcttgtaggctcagctgctgtcccgggagtgtgggcagcacctggtggaggcagacgacctgttgcagaagcatggactgctggagggagacattgccgcccagagcgagcgggtggaggctctcaatgccgctgccctgcgcttctcccagctgcagggtgagtcttggggctggggctggggctatgggtggagactgtcaggactggtgctaatagaggcaagagtgactcctgagagaaggaaagagtgagctccttgtccttggaggcatttaagcagagcctaagattacattccactggggaagtcatagggagaatcagtgccctgagtggcaggatgggccactcgacctcttcctgctttagattctgcagtaataacccacatttattgagcacttgttatgtgccaagcccttcacagattgatctcaacgaataccatttaaaaagacttgtgtgggctgggcacggtggctcatgcctataattccagcccttttggaggccgaggcaggaggatcacttgagcccaggaattcaagaccagcctggccaacatagaaagacatcatctgtaccaaaataaataaataaataaattagccaggcacggtgatacaagcctgtagtgccagctatttggaggctgaggcaggaggctcacttgaggccaggaattggaggcttcagtgagccatgatcatgccactacactccagcctgggtgacacagtgagatcttgtctcttaaaaaaccaaaaagaaaacttgtgctaagtaatgttaatcagggcctatttaacacaagtgatagaaactcagttcaaatggcttaaggtgaaaaggagtggattggctaatgtaaccaaaatgttcagggaagcctagtcaacatggcgaaaccccgtctctaccaaaaatacaaaaaattaggtaggcatggtggtgcacgcctgtagtcccagccactgcagaggctgaggtgggagaatcacctgagcctgggaagtcgaggctgcagtaagccaagattgtgccactaaactccagcctgggcaactggactgagaccctgtcagcaaaaaaataaaataaaaaaaaaaaaagtctggggaagggtgggttttacctcaggcatggctggatccaggtatggctcaagggtgcttttaggactccatctgagaccaggcatggtgtctcatgcctgtaattccagagctttgggaggcaaagatgtgaggattgcttgaggccaggagttttgggcaacatagtgagaccccatctctatatcaaaaaagaaaaaaaaaagaaaaagactcaggccaggcacggtggctcatgcttgtaatcctaacactttggaaggccgaggcaggcggatcacttgaggtcaggctttggccaacatggtgaaactccgtctcttctaaaaatacaaaaaaattagccggacatagtggtgcacacctgtaatcctagttactcaggaggctgaggtgggaggattgcttgaacccaggaggcagaggttgccatgagccgagatcgcaccactgcacactccagcctaggtgacagagcgagactccttctcaaaacaaaaacaaaagactccatctctctcgtctctctccatcactagtctttgtgttagtgtcactgttgagcagtcctgtcccttgtggtataaatctgggatcattcagccccaggtatacagcctaacaggttagcagagccaatgggacccaggcccctttctcccaagagttctgacaaaaagtcctaggagagcttgcattggctcacagtgggttccatcattgctcagccaatcattgtggccccagggcatgcagtgatctaatcggccacatgcatgtgacctgcctaccccagggccaggagtggggtcagcccattacaaaggcttagactgaaaaagaggagagagggacggccttaccagatatggatgggacatggatgctgataggcaaaaccaagactggctctaataaggttcctgtcttacttatgtcaatgccctccagccagagaccaccaggagtccctctgtggtcaaacgaagttgggtttggtggctctttacacccaccatggggagctgtggggcttctcagcaagaaagtatgatggggggctaggcgcggtggctcacgcctgtaatcccagcactttgagaggccaaggtaggtggatcacatgaggtcaggagttcgagaccagcctggccaacatggtgaaaccccatccctactaaaaatacaaaaaattaatttggtgtggtggcatgagcctgtaatcccagcaacccagaaggctgaggcaggagaatcgcttgaatctgggaggcggaggttgcagtgagcctagatcgtgccactgcacaccagcctgggcaacagagcgagacctcatctcaaagaaatatatatatatatatgactggtggcttattgtaggatttgggcttgtgttaggtgatttggaagatgattcagtgtagtgagttttgctgtggattggatgctgtcagaatatgggggtgactaggtgattgggggtcttaatcattttgatctaggtggtgggaggaagagaaggaggctgttgcattcattggcagctgtcattcatctgagccggcgaggggatgcgtggtcatttttgtggtttgcacagtgaccttgattttgtctgtgctcaggcaagattatggagcgagcttggttttgtcctactccatcgtggtcagagtggccccatctgatatgagcgttctgtgagttttttttattattattgttgttgtttattgctttttttttttttttttttagacacttgatctctctatgttacccaggctggtcttgaactcctgggctcaagcaatcctcccgcttccacctcccagagtgttgggattacagacgtgagccattgtccctggccatttctgtgagattattatttttacttatttatttatttttgagatggagttttgctcttgttgtccaggccagattgcaatggcgcgatctcggctcactgcaacctctgcctcctgggttcaagcgattcttctgcctcagcctcccgagtagctgggattataggcatgcgccaccatgtccggctaattttgtatttttagtagagactgggtttctccatgttggtcaggctggtctcaaactcttgacctcaggtgatctgcccgctttgtcttcccaaagtgctgggattacaggtgtgaggcactgcgcttggcctgtgagattatttatactcctcagaacacgatggctagccctgagtgctgacggcagttggggctgctttatttctttctcactgatgaggaaactgaggcccaggccatggagctgataagagggtcttgaggctggtccgtatctctccattaagatgttctcctcctttatctggagcccacagccctttggaatcttggagcattattcgaaaaggaagaacctgtctggcttgcaggttgatggggaagtttctcaccctagccgacctgggtcacatcctaaatgcaaatgctgaagtttccctccacgccctggtgtggacatcctgaccctggctcagctccctcccatccccatctcacctccaggggaggttgttgggaccctctccttcaccttagctaggtttgtctcaggaagctccctttgccctcgccttgtgaattctcggctcctgtgacaatcagcagctccgagaatacagcagaggggccagtgtggggagtgcgagtgtggggagtgcgttgtcatggggatgggaggcagcgcttcctgatgggtggtccagagtgtgagctcctgatgggccacttcttagctgatcctagggcaatccttcccctctctgaggctcagtctcttaatctggaaaatggggctgataaggacactggcctcataggatggttgtgagaatcaaatgacattgtgtcagagtaagggctgggtacatggaagctgttttttttttgttgttgttgttttgttttctaagacagagtctcactctgttgcccaggctggagtacggtggcactatctcggctcactgcagcatcaacatccctggctcaagtgatcttcccacttcagcctcccgagtagctgagactacaggtgcacgccaccatgcccagctaatttttgtatttttggtagagatggggttttgccgtgttacccaggctggtctcaaactgctgacctcaagtgatctgcctgcttcggcctcccaaagttaggattacaggtgtaagccactgcgcctagcaagaagctgttgttattgtaactattattcagttggataccttgtggtttgagtcaacatcagcgaatgtccagaattacagaaatcccgcattccacatagggcagtgtctcacttttatgatccagtaagaaatacacagccaggcagtggctcacgcctgtaatcccagtactttgggaggccaaggtgggtgaatttcttcagcccagatattggagaccagccagcgagactctatttctacaagaaacttagaaaaaaaattagccaggcatggtgttgtgggcccatagtcccagctactcaggaagctgaggcgggaggattacttgagcccaggagttggaggctgcagtgagccatgatcatgccactgcactccagcctgggtgatagagtgataccctatctctaaaataaataaataaataaataaacacacttacctcatgactcacagttcacatgcatacatgggcacacaggctaacacagaggttttataaaacaatacttccaggctgggcgcggtggctcaggcctgtaatcccagcattttaggaggctgaggggggcggatcatgaggtcaggagttcgagaccagtctggccaacatagcgaaaccccatctctactaaaaatacaaaaaaaaattagctggacatggtggcacgcgcctgtaatcccaactactctggaggctgaggcaggagaatcacatcaacctgggaggtggaggctgcagtgagctgagatcaagccattgcactccagcccaggcgacagtgagagactctgtctcaatcaaacaaacaaacaataccaaacaacaacagcaacaacaacaaaaatactcccccgaccttgttttgcattgtgatattttccgttccttctattctattccaccaaacaaatgctggctgtgacccattaaattaacttcactgttttctagtcgccaactagccatccaggaggaaggtgaactatttaaggaaaaagagggagttcggggttaagcacagtggctcatgcctataatcccaacacttcgggaggccaagtggaaggattgcttgaggccagccgttcaagaccagcctggccaacatagtgagatcctgtctctattttaaaaagaaaaaggagtgcagataaccactgggattgatagataatgcaacagaggatgacagagggaacctagaaacatggtttaagaaaagagaagttggccggtggcagtggctcatgcctgtaatcccagcagtttaggaggccaaggcgggtggatcactggaggtcaggagtttgagaccagcctggccagcatggtgaaaccccgtctctactaaaaatacaaaaatgagccaggcgtggtggcgggcgcctgtaatcctagctactggggaggctgaggcaggagaatcgcttaaacctggaggtggaggttgcagtgaaccgagatcgcgctactgcactccagcctgggcaacagagtaagaatctgtctcaaacacacaaacaaacaaaaaacaaagaagtttcatttgactcagttctgacataagcacaattttcactcaaatatacagaatctgagatgctctgaatccatccatcattcagtcaacaaatcactacattcactaggctacagctctgggctccaccctttgctgggcagtgtttgggatagggtgtgacagacccaggtcctgcccttaaggagctctcagtccagtgggggagacaggacaaggcaatgacaacacagagtagtcagggctaggatggggaagcagagaagcctgagagggtcgaggaggagcctgctccagccttggggtgtcagggaaggctgcctggaggaggagccacgtgacccggcatctgatgaagtcacaccaaggacagggtaggtagcccgcaccatcctctcttgggcgccccttggcttgtgaccaatcctggatgctccccttctcctggctcaggctaccagccctgcgacccgcaggtcatctgcaaccgcgtgaaccacgtgcacggctgcctggcggagctgcaggagcaggcagcgcggcgacgcgcggagctggaggcttcgcggagcctgtgggcgctgctgcaggagctggaggaggccgagagctgggcgcgcgacaaggagcgtctcctggaggctgcgggcggcggcggtgcggcgggcgcagcgggcgcagcgggaacagcgggcggcgcgcatgacctgtccagcacagcgcgcctcctggcccagcacaagatcctgcagggcgagctgggcgggcggcgagcgttgctgcagcaggccctgcggtgtggcgaggagctggttgcggccggcggtgccgtcggcccgggagcagacaccgtgcacctggtaggcctggcggagcgcgcggcgagcgcccggcgccgctggcagaggctggaagaggcggcggcgcggcgagagcggcggctgcaggaggcgcgggcgctgcaccagttcggcgctgacctcgacgggctgctggactggcttcgcgacgcttaccgcctggcagccgccggtgacttcggccacgacgaagcttccagccgccgcctggcgcgccagcaccgcgcgctcaccggggaggtggaggcacatcgcgggcccgtgagcggcctgcggcgccagctggcgacactcgggggtgccagtggcgcagggccactggtggtggcgctgcaggtgcgcgtggtggaagcagagcagttgttcgctgaggtgaccgaagtggcggcgctgaggcgccagtggctgcgggacgcgctcgctgtctaccgcatgtttggcgaggtgcacgcgtgtgagctgtggatcggcgagaaggagcaatggctgctctccatgcgtgtgccggattcactcgacgacgtcgaggtggtgcagcaccggtgagcgcgcacatgtgggactccggggtccccttcctcatgcacccagtctcaccttcattggctcaacagttcccatgtttgctcagctggaactaggagttccaatccctgcttcacccatagccagctttgtgacagttctgcaacctgcctaatcttcctgaacctcagcttgcccacctgtataatgggggtgatattagtccctacccaggcttgtgatgaacggtaaatgagttcatacatgcagaatacgaagcaaatgcctgggggtagaggaagcattcccccagcatttgctcttgttacccaggcttacattcgccaagcatgaaatcaacgacctatgcttctacagggacacctcagcctggcccctctgctgggaggcctcccattgcttctgcataaatgtcacctccctagctactaaaatagctctgactcttgtgattttccattgtttcatcctgttttacatttctttgtagcacttaccatcccatgacatattgtatactgacttgtctgttggctgacttagcaatgagttgttcaattagtgggtgaacaatgcctattccccctctgcaccactctgtctgagcatcttattcatccatacattcattcagcaggtgtttactgagtgcctatgcctttctaggtcttgtgctgggcactgctggaaacacagggctgctccttgcccctactgtgcctgcagttgcccagttctttgaaacattgatttaaagatgggaggaccatgtctagcttaaagtagacctcagtggctgccatgtggagggcaggttggagcgggtaagagttgtggctgggaacccagagaggcaactgggctggggacccagatggagcggaacaagattagaccagggcgggaggtaagtaaacaggccatggagactgatgggctggagcgattttccaaaacaaagcccagggctctggcctggcagatgacagtgctgtccccaacatgggggcccagaggaagaacaaatttgagtcaggtgggtgtgaatagccccaagaaggtatacagtaggctttgaggtcgaagacaggttcaaaaggtaagaggttgaggctggagactgaggtgtgactgtcatgagttcaggggcaaagaccaaggctgtggggctgggtggaatcattgaagaagggtgtgaaggaaaacccagagggctcagggtggagttgctgctgaggaatctcacatttaaacatcaggtagaggctgggcgtggtggctcacgcctgtaatcccagtactttgggaggccaaggcaggtggatcatataagatcaggagttggagaccagcctggctaacatggtgaaatcccgtttctactaaaaatagaaaagttagctgggcgtggtggcgcatgcttgtaatcccagctacatgggaggctgagacatgagaatcgcttgaatccgggaggcagaggttgcagtgagccacaatcgcgccactgcactccagcctgggtgacagagcgagactctgtctcaatacatacatacataaattaattaaattaaattaaataagttaaattaaattaaataaaataagcagcaagtagaagagaaggagcccacaaaggaggctgaaaagaagggtggattgagaattaggagtagaaccagtagaaggtatttcataaaaccaaggtccgcagggttcgggtgtctgagcatctccatcctcctgcagattcgagagcctggaccaagagatgaacagcctgatgggccgcgttctggacgtgaaccacacagtccaggagctggtggaaggaggccaccccagttcagatgaggtgcgttcctgccaggaccacctcaacagcaggtaggagggcctggggctgggagtccctcccatccttcccttccacactcacacagccatggacagcaagatgtgcaatctcaaacccctggaatcataatggccacccgataaatcaacaaaatgttgaccaaaaatcataatccctgatactggtgatgacgtggtaaaattaaaacaacatttcagttggctgttcatttatttgtccagaaagaatgtattggatatctacaatctgccaggagtattcccaagcactttatatacctttctaaagtatcccaacattcttccgggcacagtggctcatactgtaatcccagcacttcaggaggctgagatgggtggatcacttgagctcatgaattcaagaccagcctgggcaacatggtgaaaccccgtctctctctctacgtgcgcgcacacacacacacacacacacacacacaaaatatatatatacacacacatatatatacacacatatatacgtatatatacacatatatacgtatatatacacatatatacgtatatatacacatatatacgtatatatacacacatatacgtatatatacacatatatatgtatatatatatacacactatatatatgtatatatatatacaaaatttagccaagcatggtggtgcacatttgtagtcccagctacatgggaggctgagttgggaggatgccttgagcccaggaggtagagattgcagtgagcagagattgtgccactgcactccagcctgggcaatagagccagaccttgtctcaaaaaaaaaaaaaaaaaaattcccaatatcccaatttccatagtaaagatcctagaattcagaactctctctctctctcttttgagacaggatcttgctctgttgcccaggttggaatacagtggcatgatcatggctcattgcagcctccaacacctaggctcaagcgatcctcccacctctgcctcctgaggaactgggactacaggtgcatatcaccatgcccagctaattaaaaaaaattttttttgtagagacagggtctcactgtgttggccatgctggtcttacaactcctgggctcggctgggcgtggtagctcacacctgtaatcccagcactttgggaggccaaggcaggtggatcacctgaggtcaggagttcgagaccagcctgaccaatatggtgaaaccccatctctactaaaaatacaaaaattatccgggcatggtggcatgtgcctgtagtcctagctactcaggaggctgaggcagaagaattgcttgaacccgggaggcagaggctacagtgagccaagatcacaccactgcactccagcctaggtgacagagcaagaatctataccaaaacagacaaacaaacaaacaaacaaacaaaaacctcctggcctcctcccaccttggccttccaaagagctgggattacagtgtaagctactgctcctagcccagaactctttaagataagtaacaaactaatatcagtacctctggaatactaccagcaattctcccagtgcaggtggggttcatagatgaagatacaagtccaaaaaggtgaactccttatccaagattactcagtctataagtaggagtcaaatacagttctggctgaatcctgagctgtagctgtttatctaatatatccagtcttcctggtaacactatgaggtggaaactaccccacattagagaggagaaaactggatctcagagaggcgaagatggaggcccaaggttacacagcaagttaggggatcaaaccgggctttgaagatggatatgtttgacttcaaagactgtgctctttttttttttttctttcttgagacagggtcttgctctttcgcccagactggagtgcagtggtacgatcatggctcactacagccttcaccgcccccgacccgagctcaagaaatcctcctgcctcagcctcttgagtagtgggactatggatgcacaccactgcacccggctaatttttgtattttttgtacagatggggtctcactctgttgcccagactggtctcgaactcctgggctcaagtgatcttctgccttggcctccgcaagtgctggaattacaggcatgagccactctgccccacccaaagactacgctcttgactctgtgctgcaagattccaatatccagggattttaaaacctctgtagccaagaccatcgcaaagcatccaggcctaaaaaaataactacaatcataacgatttacagcatgtagagagatctatatgccaagtgctttagccacatgatctcgttacacactcaatgaagtggactttattatccccattttccagatgaggaaactgaagatcagagaaggaaatgatttgcccaaggtcacatggcaaatctggccagagcagaacttgaactcgggtctgcctgatttcagagtcctaatctctgtcctcatggtgtgtccattctagagggggcagaaagacagttaaatacactaataaatggacaagatatttagagaatcataatggctttatgcaagaaacaggcagggcatggtggctcacgcctgtaatcctagcattttgggaggccgaggcaagcagatcacttgaggtcaggagtttgagaccagcctggccaatgtgatgaaaccccatctctattaaaaatataaaaactagccgggtgtggtggtgcacgcctgtaatcccagctacttgggaggctgaggcaggagaatcccatgaacctgggaggcggaggttgcagtgagctgagatcgtgccactgcactccagcctgggcaacagagcaagactctgtctaaaaaagaaaacaaaatttaaaaaacccaaactattgaggaccccaagagcttgttttagtgggtcatatctattgctatttactatattagaacttagtactgagaaaatttaaaatgtttttatttttatttatttattttgagacagggtctcattactctgtcacccaggctggagtgcagtggcacaatcatggctcactgcagcctcgacttcgcaggctccagcaatcctcccatctcagcctcccaagtagctgggaccataggtgtgcacccccacgcccagctaatttttgtattttaggagtctcaccatgttgcccaggctgctctccaactcctgagctcaagcgatccacctgcttccgtcttccaaagtgctgggattacaggtgtgaaccactgcacccggctgagaaatttgaaaacattatttaaaaataacaatacactgggagtggtgcgtgcctgttagacctgtgaggctgaggtgggaggaccgcttgagcctgcgaattggaggcttcagtgtgccataaacgagttcatgaatagccactgcgttctagcctgggcaacatagtgagatctcacgtcttaaaaaaatttttttaaatctaaatatctaacgtgttaatataacttttttattaaaaataacttttcataacacaaaatgtactaagagtggcattgtttcgtacctttgcaaatctctttaaagtctggtttaagagatggcagctgggcttctcttaaatcagagtcggcttctgctctcagtctctcctgccgcctctggaaaactccactgaacactcgggaaagaatgagagtgaaaaagcaaatggcgtcttaacacatttttatgaagatagttttgtcctctatcagattacatgttgagaatggctgccctaagcaaaagtgctgcgtagggttccattttacaccggcagaaactggagaaactttctgaggtcacacagtggctgggtggcttgggcctggattctaccctgggtcggcgggccctccgcgcccaagaggagtccctgtcctcctcaagtcactctctttcccctgggcaggtggaaccgcatcgtggagctagtggaacagcgcaaagaggaaatgagcgcggtgctgctggtggagaaccacgtgctggaggtggccgaggtgcgcgcccaggtgcgtgagaagcggagagctgtggagagcgcgccccgggccggcggcgccctgcagtggcgtcttagcggcctagaggccgctctgcaggcgctggagccgcgccaggcggcccttctggaggaggcagccctgctggctgagcgcttcccggcgcaggcggcgcggctgcaccagggcgcggaggagctgggcgccgagtggggcgcgctagctagcgcggctcaggcctgcggcgaggcggtggcggcagcagggcgcctgcagcgcttcctacatgacctcgacgctttcctggactggctcgtgcgcgcccaggaggcggcgggcggcagcgaggggcccctgcccaacagcctagaagaggcggacgcgctgctggcgcgccacgctgcgctcaaggaggaggtggaccagcgcgaggaagactatgctcgcatcgtggcggccagcgaggcgctgctggccgccgacggcgcagagctgggcccgggcctggcactagacgagtggctgccacacctcgaacttggctggcataaactgctcggcttgtgggaggcgcgcagggaggcgctggtccaggcgcacatctaccagctcttcctgcgggatctacgccaggcgctcgtggtgctgcgtaaccaggtgcccactcggggtgtacatttcggagagggagagtccgaggccgcggggggattgcagggacagggacatgcgggggtggggaggagggtgtttcctgggaccactgggttctgaggtgggtgggaggtgagagagtatccggaatggataactgagtttgtggaacatccagtgtgtgtggaagtgtgtatgtaacagaatttgaggagtatcatcagtggggtaggttggtgtcttatcggaggtgacagtttgtgggctatcccgagtaagtaatgcacgaggatatttattggagtggcttcctgggttcgtggattatctgaaaggaaataagactatgaggttgattggcgatggttaaatggggttcaaagaagatcttggtatggataacaaaggattaggattatggaggtaggtaacaggctgaggggttattggagtcagtcagtgattgtggattacatggtgtggatggctaaattagcacaatatcttcatttctgggaatgacaactatggattctctggagagagtaactgtgtctgtggcatgaggaaccaagtgcagtggttatctggggacagccaatccagttgggagatcactctgggatgggaaccaagtttgagaattttggcaagatggaacagccagttttcagattgtccagtgtttggggatcatgttagaaagggtgcctgcctgtactggttatataagggatgctgacccagtttgaggattatctacagcagtggtccccaatcttttttttttttctttagatagagtcttgctctgtagctaggctggagggcagtggcgtgatctcagctcactgaaacctcagcctcccgggttcaaacgattctcctgcctcagcctcccaagtagctgggactacaggcgcgagccaccatgaccagctaatttttgtatttttagtagagatggggtttcaccatgttggccaggatggttttgatctcttgacctcatgatccgcctgcctcggcctcccaaagtgttgggattacagacatgagccactgcaccaggcccagtccctaatctttttggcaccaaggactggttttctggaagacaattttttccacaaaccggtgggaaaaggaggaatgttttcaggatgattcaagcgaattacatttattgtgtgctttatttctattgttattacattataacatataatgaaataattataaaactcactataatgtagaatcagtgggagtcctgagcttgttttcctgcaactagacgttcccatctagtgacatctaggggtgatgggaggcagcgacagatcatcgggcattagattctcataaggagtgtgcaacctggatcccccacatgcgcagttcacaatagggtttgtgttcctatgagaatgtaaagctgctgctgatctgacaggaggcagagctcaggcagtaatgctcactcgccccccctccacctcctgctatgcggcccagtttttaacaggcgatggactagtacccctctgtggcccagggcttgggaaatcctgatctagggagtggaggagaaaggacagagagcccctgaatcataagattactaaatatggagctgaagtggccttgagagaccctttctgacccacccatttaaaaaatagagacaggatcttgctatgctgcccaggctggtctccagctcctgggctcaaacagtccccctgctttggcctcccaaagtgctgggattgcaggtgtgagccaccatgcccggccctgacccactcattttactagttagaaaactaaccccagagggaaaagaacttccttgagttcacacagtacccagtttagttgtcttctttttttgagacaggacctcactctgtcacccgggccagagtacagtggcacgatcatgactcactgcagccttgatctatggggctcaagcaatcctcccacgtcagccctccaagtagctgggactacaggcacgtgccaccatgcctggttaattttttgtatttttagtagagatgggatttcaccatgttgcccaggctggtcttgaactcctggggtcaagtgatcctcccgcctctgcctcccaaagtgctgggattataggcatgagccaccgtgcccagccttcagtcttcatagtaaccaattttttttttttttttttttgagatggggtcttgctctgtcacccaggctggagtgcagtggcgtgatcttggctcactgcacctcctccgccttctgggttcaagcgattctcctgcctcagcctcctgagtagctgggataacaggtgtgtgccactacacccggctaatatttgtatttgtagtagagatgaggttcaccatgttggccaggctggtctcgaactcctgacctcaggtgatccacccacctcggcctcccaaagtgctgggattacaggcatgagccaccatgtccggcctaatattaaccaaatatttactgagtgcctcctctgtgctgggcgctattttggggctgagcacacctcaggcaacaaaatacaaaatcctgccctcatgtggttgacattctagtatgtaggggaggagagagtaaacaagtcaatgcatcgctaatattgccaggtacatgctatgagaaataatacaggagggttggctgggtgtggtggctcacgcctgtaatcccagcacttcgggagtccaaggcaggtggattacctgcggtcaggagtttgagaccagcctggccaacatggtgaaaccccgtctctaccaaaaatacaaaaaaattagccgggcatggtggtatgcacctgtaatcccagatacttgggaggctgaggcgggagaatcacttgaacccaggaggtggaggttgcagtgagccgggattgcaccactgcatccagcctgggcaacagagtgagactccatctgctccctccctgccaaaaagaaataatacaggagggtagtgggatagggctggggtgggagttgataaatttggcaggttggtcagagacctgaagaaagtgaaggagccagccatgggggtatctggagggacagactcccaggcagaagcaccagcatgggcaacagccccgaggtgggaccacaactggaatgttctatgcttgcaaggttgcggggagtggtggcaagccaggctggcagcctctcccaggtcctggaatggaatgaggctgacctttgcaccacgctccctcctccccaggagatggcgctgtctggtgcggagctcccgggcacagtggaatcggtggaggaggccttgaaacagcaccgtgactttctcaccaccatggagctgagccagcaaaagatgcaggtggccgtgcaggctgcagagggcctgctgaggcagggcaacatctacggggagcaggctcaggaggctgtgacccggctgctggagaagtaggtcccctagacccatccaccccagggagggggcagaagatggggcccagcataggggagtggtgtgggaggccagggtcccactcctttcatcacgatttctgcttctctggggctctttcctatttctatttaattccatgttgtcttagatttgatttaagtggatttttttttttgagacggggtctcactgtgttgcccaggctggagtgcagtagcacgatctcggctcactgcaaccctcacctcccaggttcaagtgattctcctgcctcagcctcccgagtagctggggctacaggcatgagccaccacgctggctaatttttgtatttttagtagagacacggtttcaccatgttggccagactggtcttgaactcttgaccacccaccttggcctcccaaagtgctgtgattagcggcatgagccactgcacctggccttaagtggatatattgtgaaaaggtaacctgaggctgtcaacccaaaagatacagaaggatatacaatgaaaggtttctttcttaagtctgccctgagcatgggatagctggtcctgttgttaaaatgttaggctgggtgcagtgactcatgcctgtaatcccagcacttcggtaggctgagacgggaggattgcttgtgctgaagagttccagaccagcctgggcaacatagtgagaccccttctctaaaattaaaaaaaaaaaaaaagctgggcgtggtgatgcgtgcctgtagtcccagctactcttgaggctgagatgggaggactgtttgagtccgggagattgaggcagcaatgaactgtgatcatatcactgcagtccagcctggatgacacagcaacattctgtcccccctccaaaaaaaaaatgtgttaacttacttccctagatgcctcattatccatcctgctcttctgcaccctccttgggaacccccagacctccccagatccagcagctagaggccaggcacaggtgtgttccagctttccagatgggacagtgtcccctgccaggctggttgtcaaatattttgcataagcacctcttcctggccccagccactctaggaagcatgcaaagtgagtgtctgcatgtctctgtgtctctctcatctcttgaacctcattgttctctgcttctgtcgccatctgtctcttgccaccactctcttgtctgtccttgcactaatcaagcgaagatatttattgagcatctactgtgtgccaggcactattgtaggtaggcactgaacaaaacaacaccaccacctccagccatcatgggaagtcctttctcatcttccagacccagttctgtctgtcattagagctgtttctgctcctcctggtgaccctaaatttctcctctcaggctctctggctctctccggcatgatccaggccagaaggggacccagtacccctccttctgtcttcccatctcctgacagaaagcatccctggtcacttcactgtgccacccccagccccaggaccgctaccccttttctgtttacggctcagacatcctttccctagatttatctggggcaaggcagcatgcttctaaaggaaacttttatgggaattctgttcttgaggatgcaaactcatcatttagtgcccccttttccatccaggcctggatccttcctttgttccactttttttttttttttttttgagacagggatcttactctgttgcccaggctggagtgcagtggtgcaatcatagctcactgcagcctggaactcctgggctcaaccaactctcctgcctcagcctcctgagtagctggactataggtgtgagccactgagcatggcctgttccacatttcttgagcacctgctgcatgccaggctcagcaaaacgaggaggaggagcccgggggactgttcattccatgattcattcattcattacttttcagtcattcattaattgctcctttcactctattgtttattcactcatcctccagtcaattaaacatgtactgagcccgtgctctgtacggagtgggggtgtgttcacagaaatgaccaggacagaacatgattcctgcctcacagagctcgaacgttatctgacaaggatggcccagaatgctcggggctgggatggaggaagtccaggcagaaaggtcagggcccggatgggagacgtgcagccgctgtgggagaggcagcatttgtcccaggcttgtggtgggtgaggtgtggtcacagagggattgagacggactaatctctgcaccttcccaccatcccagtcatttatttgtctagggacacatttcccaccctgtgggaggagtgggaggagtgggaggagtttccacatccgccaagggggcagagccatacagagctggggactggggccctggggccctgggggtcttagacctggcttcacccctgaatccgtgacattcagggcaagtcacttagagcttcagcttgcctggcccctcacctggaacctgtgtgtgaggtgctgttctttttttttttttttttttttttgagatggagtctcactctgtcacccaggcaggagtgtagtggcgcgatctcgcctcactgcaacctctgcctccagggttcaagctattctcctgcttcagcctcctgagtactgggatcacaggaaagagccaccatgtccaactaatttttgtatttttggtagagacagggttttgccatgttggccaggctggtctcaaactcctgacttcaagtgatccacctgcctcggctccccaaagtgctgggattacaggcgtgagccaccgcgccggccgctaggtgctgttcttatctgcgttttgcatgtgaggctcagaggggaaaactgacttgcccagagtcatggccaggaagtgccacagcctagatttgaaccctgttgctttcttttcttttcttttttttaaagacagggtcttgctttgttgcccaggctggagtgcagtggtgcgatcactgctcactgcagcctcaatctcctgggctcaaacaatcctcctgcctcagccttctgagtagctgggactaaaagcatgtgccaccttgctcggctaatttttcattctttttttgtagagatgaagtctcactatattgcccagggtggtttcaaactcctgggctcaagcaatcctcctactttggcctccccaaagtgctcggattacaggcgtgagccatcgtgcccggcctactctgttgttctttcaccctcatggagactcagggtcttcctcatctctaggactgatgcttgacagtttggctgctgaaggcctggaaagattgatttcagctcaatttcagaggcattttatctttcctggctcctaagctaagttgggcaggaggcagtcagtgcttcgcttgcttgtctcaggcccttcctgttccttctctctggttctgtctctgcaactgtctcctatacactctgtctctttgcttccatctatccatctatttctgtatctctgtttcctgctccctctctgtttttctctccgtttttctctccctccatctgcacctctctaaccctgtcttttctgcctctgtctttcacagatactgtacttttgtttctcccatcttttttctctctgccactgtgtttcttgcattcattcatttaacaaatataagtcgagcgtgtactgtatgccaagccctttttctaagcattggggacacatctatgaacaaaacagacaaaaatccctgccctcatggaaatgatatatcctagcatgggagacagccaagataaataagtaacatatagcacgtgttagattgcgttaagtgctaaggagaaaattaaagaagggaagaaagccagaaagtgttggggagtggtcaggagggacctcacgaagaaggtgatctttgagtagatgttgggggaaggagcattcccagcagagggaacggctagtgccaagggcctgaggcttgctcaaggcacagcgagaagggcagtacagttaccacagagtgagggggaagagtgcaaggagaataagagtttggaaaggtgggggtgtggggcctggtaggtcagaaaggcctctgagattggccgagtgcaggagctcactcccatcccagcactttgggaggccaaggcgggtggatcacttgaggtcaggagttcgagaccagcctggccaacatggcgaaaactcgtctctactaaaaatacaaaaattagccaggcctggtggtgggcgcctgtaatcccagctagttgggaggctgaggccggagaatcgcttgaacctggggggtggaggttgtagtgagccgagatcacgccactgcactccagcctgggcgatggagcgagactccatctcaaaaaaaaaaaaaaaaaaaaaggactctaaggactctcatggagaccctgggaggatctctaaggactctcatggagaccctgggaggatagtctcattctctctctctccctgggggagacagatagcaacaggacagggatgcatgggagcccatgtgggatgccccagccccatccaccaggcctcttgggcactttgccttgcactgtgggcaggaggccagactgcccggggcccatggtcccagccggctccagagtggtacggcctgggtccagcctggtcagttcagtcaggccaagggcctcgctctgcctgcaggagtgcccacttcagcttctctgcgactctgctgtcatctctccccacactctgctctcttccctctctccaactctgcggccccctggtctgtctgtcgtctgtggggctgtcttttcctggtggcatttgccactcctctgcctgtctctctctgggctgtccctgaccggactcctcctgtcactttccctctctctgcctcctctctttcgtcgtctgctgctccctgagtttctttctggctctgccttgctccatctcttttctcgtctttttttattctctctctcgctctctttctggtgtctcctctcactttctcgtttgttttgttttgtttttgtccctaggtatgtctgtctttacttctctgttatctttctctctggacttgcctttttttctctccgtctatatctctttctttctaagtgcctgtctctgcctctccctttctcttcctctgtctgtctctctctctgcccttcttcagccccgtccctgcgtccctggctttgccccactaattcctccctctctcttacatattttccacgcccttcttcccctacccagcccagtgccctcacagtcctactgccagcgccgcaccccccaacccggggcctttccccagcccttatctccccatccccaggaaccaagaaaaccagttacgggcccagcaatggatgcaaaagctacatgaccaacttgagctgcagcacttcctccgagactgccacgaggtaggaactccaggtgtgctggggacggagacatcccctttagtcgggagggaagtgcttctcggccgaggtgggggtggggacgccccgtctaagtgggtcgcggagcgatgctcgctctaagccgccagggggcgcgcggagccgggtctcagtgcgcatgctccgcaagtccctgcccgcccacgccgactccgggaaacgaaggaggggccccgggcgcccctggcaaccgcgcgtgtccgcgcctacgggtcccgcggggacgcgcgctgatctcacctttctctcctgagatttgtgagaatcgctctaccccaggagaggggcggggcgggcggtggggataagggccgagggccgtgggggggccagcggccctgcgccctcctgcagccagcgatggctctgaaccaagccctcgcccctttaaaggtgttcagtaatcaagccccttcccttagggatgatctgcacacattagggacgatctcccctaatccgagatggtccaggcccccttccttattagtgacggttcaggagacctgctgtcttcccctccttcccttgcattccatagaaacgattctagactttggccacattagagatggcctagtaaacattttcctaaaccctaaacagagctaggcctggccctgagcccctccatctgtgtgacccaggatcatcccctcctccatcatcaccccgtacctaagtttcttccaaccaaagctggttcaggaaccaggtctaacccctaaacccctcagcctcaattaaagacgattcgaccctcccccctatgttgaacacccatgggagattgttctctccgcacacggaataaacaagggcctccataccgtgcccccctcccccataactggggtaggccgggacttgagccactggaggaaccccctgttccccctcgcccccactggagattgtgagatgttccaggtcgccctcccatatcccctgtccacatgtggtggccaggagcccgagcttcttcccattagagatggttcaggaggcccccacccagcccctcaccataatccccactcccttagtgaggcagtccaagccccaggcgctccctcccggcattagatttggtccaggagcaccccccatccctcatgagattgttctggatcaggcagcaatcatctgagatggcgcagaagccccccacccgaagccttggggcgagtggtggttcctcctgcacccccacctggggccccgcaaagaggcgggcagggaggcaggcagggggcgcacgcgggcgggcgcgcggccgccgcgcgggggcgagggagggggcgcgcggccgccggagcctcagccttcgccgccgctgccgctgccgtcgcagttgaggggcgagcacccgcccgcccgctgcagggacgccccgccaacgccactgccgcttcaggtctcgggggcgcccaggggagggggttggcgcgcaccccgcggacgcagacaggggagggggctcgggcgcgtgcccgcccgtcgtggccgcgggagggaggggcggggcggcgcgggggcgggccgggcaggcgcccggacccccaccctgggggaggggcaaggacgccgggagctgtccgcggtgctggcgcgggcgggactgaggggccggcccccaagggaggggagcgaagcggggggacttctaagaccacttctagggtaatctggatttgccctaagggttcagggcgtctcagcctttcgagggggggctcttctccgggtaatggggcatctaagatttgccctggggttgggggtttctcaaccttttggggggtttctttcttgttttgggaggatctgtatcagccttggatgatggaggtgaatcacttttggggggctctgccttggaagatgaggggccttggattttctctgggtctagggggctctgactttgtggggcttttcctgggttgttggatagtctggttttgccctccatcatgaaggaatcacttttgagggggctttactttgaggatggggtaccatctctttaagggctctgctttcactgcgggctgtggttgccgttggactcttccctgcacgtcgggaacctgtgaattgagttggggggttcagcactggacttggttctagtgtgtgtatgaaggagtgtgatgctgtcctggacccctggggagcacatgctcaggggacatgggctggggtttggccggctggggatctgggatttgtccttggctatgactgcatttgcctcccgggaccgcggagctggagtccagtgtttgtttttttttttttttttttttttttttttttttttgcaggagggaggagggaggatcttgtgactggagtggggaggagaaaggggaggagcaaactgtttcaggtgccaggtttggtcatgagtggggaagttctggcttggaggataagtctggttttttactggagggggttgggggaggctcaaaaagcagcctgtgattgatcctctctagtgccgtgagaggggcccactcttggtgcttgcgttttggatgactggttttgttggtgggtaggaggactagaactggctttagttgtaggggtgggggtgctggccgggcttgggaggtccgatctgatccacgatggagagtctgtggctagattttggggtagactggtttggagagccagaacacagctttgtttttcacatttggctggggttggctttggttgagggctagaactggtcatggtttggggatctatggtcttagagtcccagggctagaactggggagccctgtgggctcattaggggtgctagatctcgattatggaggatgggtctactccagattagagggttagtttagagagagctagagttggctttaattgggaggttgtttggggggtttatctggccatactggaggaactggggctagatatgggggcttcatttgatacccttgggaatgggttgaggctcttgaattggtccttattggggggtggctaagattgaatgaagtgtctaagtgttgctatgggaggggtggtcctggggatgaattgggagttagctaaattgggttggagagcttgttttggggggggtgatctgtccccaagtctaagaggctgactggccctgccttgggggcttgtggggagttgaggagggcttccctcaggacaggggacaggggagcaaaggattgggcattctggggacccttccatccatcctctatccaggaaagagcttgagctgcacccacccccaatataaaggcctcacttgcaaaggttttttcatcctttcctattccttccacccatacaccctagcagcccaggccctgaacctgggacttcctgaagggatggggggctgtggcaggttgaggggaccagctgagccctcctgccctgttctgcacagctggatggctggatccatgagaagatgctgatggcgcgggatggcacgcgggaggacaaccacaagctgcataagagatggctccggcaccaggcattcatggccgagctggctcagaataaggagtggctggagaagatcgagcgggtgaggaagctgatggcccctctgcctgtgccaggtgcaggaggcctccagggagcccacgtctcacctgctgcacccgctgctgccatcctgctggtcttacacctctggactgactcaaatcagctccagatctgctcctagctatgtggctttgagtgattcatgtaacatctttgagcctcaatttgctcatctgtaaagtggccagcatctcttctgaatggtgcctgtatcctactgtttgttaaatatttcacttcttaatataacctcctctaccaggttccttccataccatttggggcatttaagatggaaggttggggagatgggctgggacagaccctgggaagcccagggttaaagtaaactttggattcttagagccctgggttctaactgtgtctatgcctgttaccagctgtggggccttaggtaattgtgttaacctcttggagcctcagtttgctgttctataaaattaaggaaataataaatatagctacttcctgggctctgtgcacataaagtacttaacacaaggccacgcacctaagagctgtaattactgtggtcttgttacttttaatacttaatgttacctaagtagctctgggccactaagaaccttgacttcagtcttggagggactgaggtagatatttgctctaagcctcaaccctcagaacttccccctcctctggctgaacccctagacctgtagccctggatatacacacttttctgactcacacagagacacccatgttggccttaaacccttaaatggtcattgatgtttcataaatggtggcatatggcgaaggcagtcttcttgactttgagtttaatggaagttcattctctccctgcctctctggctccctctatctttctttcctgtctgtctatccctctatccttgtctttcttacggtcctctccccatgtttctgattttctgtgcctgtctctctgttgatcactctgtgactgtttgtctctccctgactccttcccatgtctctgtgtccatctgtctctccctgtatctttctgtctccctcccctcacttctgtctgtctgtctctctcttcttgtctctcttccttggttccttccatttctgggcctatctctgcatccacccctcatgtctctctctccctatgtgtctcccactccctgcctctgattctcttttcacatccttccctgtgtcctgtcactctcccacacttctctgattctccccaccatctatctatcttctccatctcctgccatccacccacttggggcaggagggccagcaactgatgcaggagaagcccgaactggcggcctccgtgcggaagaagctgggcgagatccgccagtgctgggcggagctggagagcaccacccaggccaaggcacggcagctctttgaggccagcaaagcagaccagctggtgcagagctttgctgagctggacaagaagctccttcacatggagagccagctgcaagacgtggaccctggaggagacctggccactgtcaacagtcagctcaagaagctgcaggtatggtcttcctggcccagatgagggctccctatgccacatgggggccaggtcagggtccaaccccactcaaggtatgtcaagtggaggggatttaatacagggatttatttcaaacttgtagaagatgagaaagggaatattgaagcaatccagctagtaataactgttggaagcagccaccactccctaaggtatggagtacaaagggaaaaggaaggatctagagccacaaagcagtaggtaaatgactagcatgctaaaggtttcacaggaccctgacactcatttcctggatggagaaaccaaggctcaggggtatgggaatggctttgcatggaataacaatgacattcattgagcatttctctaccagtctctgggccaagcactcactgaactcatcccagccacttctggagattggtactgttattatcctgttttaccaatggggaaactgaggcacagaaagtaaggcacctggcccaaggacacacagctaaccagtgtctcctttatgaaacagggcactcttagagaacagacgcagcgtctgcttgtatctgctcccagcttggcagctccatgcttggtacacagcagttcacgtggaatgaccagaggtgaacgtagccattgcttctcacctcccagggagtaatggctcctgcctttgattttctttttttgttgctgttgttgatgttgttgtttgtttttttcttcaagatagttactcactctgtcgcccaagctggagtacagtggcttgatctcagtccattgcagcctcaaactcttgggctcaagtgattctcccacttcagccttccaagtagctgagaccacaagcgcataccaccacgtctggataatctttttaaattttttatagagacagggtctcaccatattgcctagggtagtctcaaactcttgggctcaagcaaccctcccgcctcagccttccaaagtgcttggattacaggtgtgagccatggtatctggcccacgtgactcctgcttttacctgtcaggaacaatgcctgactgactgatgggaaactgaggttccaggaggtgagaggtgaacttacttgtccagagtagcaaatagcaaagcctggatttcagtccagtgcccttgactcttcactcctcctttttgatatatttcctatgtagttatatagtgcttggcatagtgtatggcaaaaaaaaaaaaaaaggctagtaagaaatacataatgacactgattagtatgtattcattcatctctgtggcaaataattattaggtaccagctgggtgtggtggctcacgcctgtaaccccagcacttcgggaggccgaggcgggcggatcacgaggtcaacagttcgagaccagcctgaccaatgtggtcaaacctcatctctactaaaaacacacacaaaaaaattagctgggcatggtggtgcacgcctgtaatcctagctactcaggaggctgtaatcccagctactcaggaggctgaggcaggagaatcacttgaacggggaggcagaggttgcagtgagctgagattgcatcattgcactccagcctgggagacagagcgagactccatctcaaaaaataaaaaaataaaaaaaataattaggtacctactatgtgcccggcacttttctgggtgttgggatatagcagtgggcaaaatggatgaaaagttactgccttcacggtgatcccattctggttgggggaacaagcaaaagaacaaaaagacaaacagatctgaatgtgatggccaatggggtcagttcgttctttttccctccgctcccctccccttcccctctcttttcttttcccctcccttccttccttccttccttgcttccttcgttggagtcttgctctgtcacccaggctggagtgtggtggtgcaatgtctgctcactgcaacctctacctcccaggttcaagcagttctcctgcctcagcctcctgagtagctgggattacaggcatgtgccaccacacccagctaatttttttatttttagtagagatggggtttcaccatgttggccaggctggtctcgaactcctgaccacaggtgattcacccgccttggcctcccaaagtactaggattacaggtgtgagccactgtgcccggccaatgaggtcactacttaatatagaatagcagttctcaaatgtctgggtctccaggaccccccttacactcttaaaccgcattgagatccttagaaagctttgtctgtgtgggttagacctattgacattcactgtattaaaaatgaaaatcgaggccaggcataatggctcatgcctgtatcccagcactttgggaggccgaggcaggaggattgcttgagcctaggagtttgagactagcctgggtaacggagcaacagcctgtctctattttattttatttagttatttgagccaggatctcgctctgttagcaggctggactgcagtggtgcaatcacggctcactgcagcctcaacctctggggctcaagtgatgctcctccctcagtcccgcaagtagctgggactacggacccacaccaccatgcctgattgattttttttttaagaaacagaatctcactatgttggccagtctttatctctatttattgaactaaaaaaaaaaactaaaacggagtctggctctgccacctaggctggagtgcagtggcttgatctcagctcactgcagcctctgcctcctgggttcaagcagttctcctgcctcagtctctggagtagctgggattacaggcctgtgccaccaagcctggctaatttttgtatttttagtagagatggggtttcagcatgttgcccaggctggtctcgaactcgtggcctcaggtgatcggcctgccttggcctcccaaagtgctgggattacaggcatgagccatggcatccagactgtagttctctttcatgtctagaatagaagagagctagcttctcccatccgtgtctgtattcaatccatttcactagcacaggtcatcaggtctctgaaaaacactgctgcatgctggagagagaatgagaatggtgaaggcaaataacatcttagtatttttataaaaatagttgtaaccttgcagatgccttgaaaagatctcagggatcccccaggggttccttggccacagtttgagaactgctgatgtacacaatgtgctgggcactgttaactcctctctcctccccaacagccccatgagggaggtcctgttattatccccacccagcagaaaaccacagcacagaaaggatctgtggctcacagaggtcacatggctaccaagtggctattcaataccacctttagtccctccctgagcctctgtcctccctcttaaataggactctatcatcagtgcaggtctcccagggccaggtggggatgtgcacagaaaggagccacttagcacagtgcccaggatgtggtaagcctgcaagaaaggggcatctgactgtcagggtcccagccagaaacagaagcaggctcacctgcagaaaacttgagtttcttgacaaaggtgtgagtggagaacggggaagctgcaggaagcatatagggctgtgggactcatggaggggagcttttgctcctccctagccagagaaggtagagaaggaaaagttattggaacttggaaggggagagttgccagacaggagctggcactcttagtcaagaacggcagccatggccagacgcagtggctcacgcctgtaatcccagcactttgggaggccaaggcgggtggttcacttgagatcaggaattcaagaccaacctgggcaacatggcaaaaccccgtctctactaaaaatacaaaaattagccgaacgtggtggcacatgcctgtaatcccagctactcgggaggctggggcatgagaatcgcttgaacttgagaggcggaggttgcagtgaggcaagattgcacctcactgcactccagcctgggtgacagagtgagactctgtctcaaaaaaaaaaaaaaagagaaagaaagaaagaacggcagccagaccatggcaccatagcagggaagagctggggagataataccccagactcactttcctctgggcttccctttgtcagccagggctggcttcatgggtgtttgcccgtgcagtgacacagggctccatgcttggtttaatgccctactattgatgtcttgaatttttttgtttttgaggcagtttctacctctgtcacccaggctgaagtgcaatggcgtgatcatggctcactgcagccttgaactcctggactcaagtgaacctgtcacctcagcctcctgagtagctgggactacaagcgtgtgccaccacgcccagataatttttgtagtattttatagagacgggggcctcactgtgttgcccaggctggtctcaaactcctggcctcaagtgatcctcctacgttagtctcccaaagtgctgggattacaggggtgaagcactgcccctggataaaattcttaataaatatttgaacaagggaccttgtgttttcattttgcactgaaaagtataagccatgtttgaggccaacccacatggaagccagaggacaggagggctggtccatgcaggtcagtcctgcacagggcagggtgaagaagcttggactatgggtctcaagatcccgggctgaagcatccatccacctcggcctcccaaagtgctgggatcacaggcgtgagccactgccccagcctattgctaggattcataattatcttgcagtgattactaattcttccccagcagtgttttgcagtggctgaaggcacagacttgggactccagcaggtctggttctgagtcacagctctcccacttgctgccttcgtctctccctctgagccttggatgccttctccttgcaatgggaaggacctcaatgctcaccccctggtggatagcaggagtgtgggaagcagcagagcatctcagtgaagggcatggatgctggcgctgggctgcctgggtcaagccctggctctgtgccttatcacctggatagcccaaggaggttacttttctctccatgcttcagtttctttttctttttttaagagggagtctcactctgttgcccaggctggagtgcagtggcaggacctcggctcactgcaacctccgcctcctggcttcaagtgattctcctgcctcagcgtcctcctgagtagctgggattacaggcacctgccaccacgcctggctaatttttgtatttttagtagagacggggtttcaccatgttggccaggctggtctcaaactcctgacctcaagtgatccacccacctccgcctcccaaagtgctgggattacaggcatgagccaccgcgcctggctgtgcctcattttcttcttcagtaaaatgggcataatgatatttctgacctcataaggacattgtgaaggtgaaaagacataatgcattaagtggtttcagaactgctgacccaacaaatctaagattcagtatttattcacaggtctttaatttttttttttttagaccaagttttgttcttgtcacccaggctggagcgcagtggcacaatctcggctcactgcaaccctctgcctcctgggttcaagtgattctcctgcctcagcctcccgagtagctgggactataggcacccgccaccatacccggctaatttttgtatttttagtagagatggggtttcgccatgttgtccaggctggtcccaaactcctgacctcaagtgatccgcccgcctcggcctcccaaagtgctgggataataggcatgaaccaccgtgcctggccagtctttaattttaactgtcataaaactgagagcatatcaccatcactctactgttttcaaaagctagttgtttcaccttccctttggttgttacttatgtgatacacggttacttcatttgtttttgttcatattccatttggggcatttacccctctccatgctgctttttaattttaatttatttttattttttgatagatggggtctcactatgttacccaggctggtcacaaactcctgggctcaaacagtcctcctgccttagcccctcaaagtgctgggattattcgcgtgagccactgcacctggccccaaaacacattttaaaaaagcaacatggatgattgggcacagtggctcatgcctgtaatcccagcactttgtgaggccaaggcaggaggatcgcttgagcccaggtgttccagaccagcctgggcaacatagcgagattcacatgcctgtgttcccagctactcagaaggctgaagtgggaggatcacttgagcccaggaggttgaagctgcagtgagctgtgatcgtgtcactgcactccaatctggtcgacagagtgagacccccatctcaaaaaaaaaaaaaaaaaaaaaaaaaagaaaagtaatttggaggtggtaaatgaaatatttatatagtgttaaaagttagaaccatctttagctcacttgcttttgccaaattgcctgcccaggtccttctgtggctgctcactctctccccagcagtacacatgagctcctgtttcctctcgtccttgccaacacttggttttgtcagacattttagatctttctcagtccgatggctgggaagtggtatctcactgcagtgtgtgtatttgtatttttttccaatgctactggcgagcttgaccatctttgaccttcttttgtactatttaggttttagaggaaggagttggggcctcctgctttagccagagtacagagttagctcttccctccctgtagggggttcagtctcaaccaagcccagcaaaccatgagatgggggtccccattgttcaagggaggggctgaagcccagaggagacaagggagtggccctggggtcacacagtgatgggtgccagaggcaggctccagcacgagactcctgggcccttttcccagcagagggagcccgaggcaggaagtgactgtgtgggccagggcacccagacggagcccagctgcccctcaggagctgctactggggaagggacctgccaaggccctgctgtcccctggggcatacacaggagaggggttggctgccatccagcctggcacgtttcctggctgtcccatccacccttagggcactggggccaggctgggctgagggaggtactggctcggggtctgaggggtgtagtggtgtgcagtgtgtgagcgatctgtccccctcagcctctctcctgtcctcccgtcgccatctctgtgtctctctcttccctttgtgtccctctctgtcctactctctcactcccttctctctgtctctttatttattttgagacagaatcttactctgtcacccaggctggagtgcagtggcgcgatcttggctcactgcaatctccgcctcccaggttcaagcgattccccagcctccccagtagctgggattacaggcacccgccaccatgcctggctaatttttgtatttttttatttttattttttctttttgagacggaatctcactctgtcacccaggctggagtgcaatggcacagtctcagctcgctgcaacctccgcctcccggattccagcgattctcctgcctcagcctcccaagtagttgtgattacaggcgtgagccaccacgcccggctaatttttgtatttttagtagagatggggtttcaccatgttggccaggttggtcttgaactcctgacctcaggtgatctgcctaccttggcctcccaaagttctgggattacaggcatgagccaccaccccagtctctctgtctctttttatttgacttctctgtctctgcctccttcccgtgttcctcatgtcctccttgtgtcctctccctcatcccgtaccacacccgctgctgcagcaggctctctgggaccccacctcccaggtcctggccacgtgacccagaatcctctctcggggcctgttgccaagctgtgcttcctggccaagaagccagatggtggagtctcaagtcctggctccccagccctcagggacctggccagctggtcggcctcagccacaggctcctgcttggagagatgggggactggtctcctgccagatgagaaaatgcactagaggctttgcagctgccaggctctgtccctggggaccccacactttttccaggcccacccccaccctaagcaaagctctttctctggccaaggaaacaccctcctcccccctgttctgcttctctgtcccatgtttttgtatccagctcagcatggcctaggagaggagtgcacattcagggactatacagtcccagtccttgccttattgggactcaaggcaagggaccccatcctttctttctttccttttttttttgtttttgtttttttgttttttgagacagagtctcactctgttgcccaggctggagtgcagtggcgcgatctcagctaattatgtcttcataattcacaaattatgtcttcaatttatgaaggtgctggctcggggtctgaggggtggagtgatcagtaactcaaattacgtcttcacaaatctccttgtcttcatttctgagcaccgctttcttctgtgttggcctcatggtcagggagtccctgatgttggcaggatgaccccaggatgcccggcctacctcctcccaacttaggaagcccatgggaaagagagcatctcttctgtgcacacacattttcctggcgaaaatggggagagtggccgggcacagtggctcacacctgtaatcccacactttaggaggccaagatgggaggattgcttgaggccaggagttggagacccgcctggccaacacagcgagaccccacctctaccaaaaaagaaaaagtgggaagagttttcattggcccatctaaggttacgtgctcatatctgacccaatctttatgaccagggtgttttcagtgttctgcttggccccacttgggtcatgtgattacccatgactctctaggtttcatttgcccttcaggaagctcaggacctgagagtgagttttgatgtatttggaaggagaggatggattttgggcaggcaaaaccaacaactctgcactacagaactttgaatcaagaagtcttggcttggttcttgagtttggggttttgttttgcagtcatttgtggtaatctgctaccacttaattttttaattgttattttgttttcttctctagctttcctccatctgtttagaattacaagggtaatatatgaatatattcttttgggaaaaaattttactaaccgagcagtcttcagtaaaacataaagtctcactcctatctgcctcccaatcccacatcccaaagagagcctcagttatttggtgtgcatccatctagacctctttctgtgcatttacaagtgtacctatatggatgtttaatgtttttatattatttgcttttcatgtttaatttcaatttttgaataaataaattttcatggtgaagacatcaaaacctctagggaaatcccatgggaaaattatcgccttcatccctgttccccattcattaagttctcatcccctcccccagtaagtaccatctgttatgaacttcttgtttactccagggaatttttatgcatgtgcaatccactataaatttatattcataggtaggttctaaattgcttcttcttcttcctcttttttttttttttttttgtttgtttgttgttgagactgagtttcgctctttttgccaaagccggagcgcaatggcgcgatctcagctcactgcaacctccgcctcccgggttcaagcaattctcctgcctcagcctcccaagtagctgggataacaggcgcctgccacaatgcccggctaattttttgtatttttagtagagactgggtttcaccatgttggccagcatggtgtctatctcttgacctcgtgatccgcccgcctcagccttccaaagtgctgggattacaggcatgagccattgtgcccggcttttttttttttttttttttttttgagatggagttttgcttttgttgcccgggctggagtgcagtggcatgatctcggctcactgcaacctctgcctcccgggttcaagtgattctcctgcctcaggctcccgagtagctgggattacaggtgtctgccatcacgcctggctaattttttgtgtttttagtagagatggggtttcaccatgttggccaggcaggtctcaaactcctgacttcaggtgatccacgcgccttggcctcccagagtgctaggattacaggcgtgagccaccgcacccagcatgctttttcttcttaacagtaacacttggctatttttccatactggtctggatttgtttaaccattttactcttttttattttttatttttttttaagagagggggtctagctgtgttgcccaggctggtctcaaactcctgggctcaagcatttctcccacctcaacctcctaagtagctgggattacaggcatgagctgctgcacctgacttaaccatttctctcttgatgggcattgaggttgcttccagttttttcccattataaactctgctgtgatactacaactttgtgcatctgtgccagtatttcttttttttcttaaaaaaatttttattattattatttaaaaatttttttttcaggatggagtcttgctgtgtcacccaggctgaattgcagcgacgtgatctcggctcactgcaacctccacctcccaagttcaagcaattctcctgcctcagcctcccaagtagctgggattacaggcgtgcatcaccacgcctagctaatttttgtatttttagtagagacagggtttcaccatgttggccaggctggtctcaaactcctgaccttgtgatctgcctgccttggcctcccaaagtgctgggattacaggcgtgagccactgcacttggcctatgacagtatttctttagttatattactagaaatgcaagtgctgggtcaagcagatgcatattttgcattttgatgcaaagacctgccaaattgccttctaaaaaggctctaccaatttatgccaccactgacagtggctgagtgtgcccatctcccaacatctttgccagcattagatactataagtcttttacatttttgccaacctaatgtgtagaaaagaatgccttggccaggcgcagtggctcactcctgtaatcccagcactttgggaggccgaggtgggtggatcacctgtagtcaagagttcaagactagcctggccaacatggtgaaaccccatctctattaaaaattcagaattggccaggcgtggtggctcacgcctgtaatcccagcactttggaaggccaaggcaggcagatcacaaggtcaggagatcgagaccatcctggctaacatggtgaaaccccatctctactaaaaatacaaaaaaaattagtcaggcgtggtggtgggcacctgtagtcccagctacttgggaggctgaggcaggagaatgccgtgaacccaggaggcagagcttggagcttgcagtgagccaagatagcaccattgcactccagcctgggcgaaagagcgagactctgcctcaaaaaaaaaaaaaaaaaaaatcaaaattaaccgggcgtggtgatgtgtgcctgtgatcccagctactcgggaggcggaggcaggagaatcacttgaactgaggaggcagaggttgcagtgagccgagatcatgccattgcactccagcctgggcaaaaagagcgaaactccatctcaaaaaaaaaaaaaaaagaaagaaagaaagaaaagaaaaaagaaaaggaagtcttgttttaatttctattttccagcttattaataagactgagcatcttttcatatgcttgttttgtctgttgcctgttcacatctgatgcccatttctctttttgggcagtcctttttttttgctgatgtcattcatgtatgcattgaacaaatcataactggaggcctattgtgtaccaaaaattgttctaggctttcaagaatatagcagtgagtgtgacacagcccctcccatcatgtgggtcacattctggaagcaagggaccaataaaaatacaaaagtacctgagtgcagtggctcacacctgtaatcccagcactttggaaggccaacgtgagaatagtttgagtccaggagttcaagaccagcctgggcaacatagcaagaccccatctttatgacaaatttcaaaaatgagctgggcatggtggtgtgtgcttgtagtcctagctacttgggaggctgaggcaagaggatcccttgagcccaggagttcaaggctgcagagagttattatcttactactgcatgccaacctggatgacagagcaagaccctatcaaaaaacaaaacacacacacacaaatcaagagagttgtctgatggtggtaagcactgtgaagacgaagcaggatggagggaaattctttgattgttaaactagttccttgcactgatacatatcaatttttacagtttgtcatttgccttctaactctatgaaattttggttgatgcagaagtattttttaattatttttttaattatactttaaattctagggtacatgtgcacaatgtgcaggtttgttacataggaattcatgtgccatgttggtgtgctgcacccattaactcgtcatttacattaggtatttctcttaatgatatccctcccccctccccccaccccatgacaggccccggtgtgtgatgttccctgccctgtgtccaagtgttctcattgttcagctcccacctatgagtgagaacgtgtggtgtttggttttctgtccttgcgatagtttgctcagaatgatggtttccagcttcacccatgtccctacaaaggacatgaactcatccttctttatggctgcatagtattccatggtgtatatgtgccacattttcttaatccagtctatcattgatggacatttgggttggttgcaagtctttgctaatgtgaatagtgccacaataaacatacgtgtgcatgtgtctttatagtagcatgatttataatcctttgggtatatacccagtaatgggatcactgggtcaaatggtatttctagttctagatccttgaggaatcgccacactgtcttccccaatggttgaaccagtttacattcccaccaacagtgtaaaagtgttcctgtttctccacatcctctccagcatctgttgtttcctgactttttaatgatcgctattctaactggtgtgagatgatatctcattgtggttttgatttgcatttatctgatgaccagtgatggtgagcattttttcatatgtctgttggctgatgcagaagtatttttatgtgatcaaattataaatctttccctttatgttttttatgcttggaaagatttttctccatcccaacattataaaagcatttgcccaggttttcttttagtgccttatggatttacttactctgtttaggtctttaatccatctggaattgttttcagtacaaacagcaaggaaaggatccagctaaattggttagccattggcccatgaccattcattaaataatccatctttcccttggggatttgaattggcacctatgaaacacatgaattttcctgtgtatttgggtctgcttttgcactttctgtctattcctaagacacagcagccatccaaattactatagctttgtatttatttttgataatttcttactatcaaatttttttatccggtaatcccagcactttgggaggccaagatgggcagatcacttgaggttatgagtttgagaccagcctgaccaacatggtgaaaccccatctctactaaaaatacaaaaaaaattagcaaggcatggtgtcaggtgcctgtagtcccagctacttgggaggtcaaggcacaagaatcacttgaacctgggaggtggaggttgcagtgagctgaggttgcccactgcactccagcctggatgacacagcacccaggctgatttgttcatcctgaggtcaggagttcaagaccagcctggccaatatggtgaaaccccatctctacaaaaatacaaaaattagccgggcatgatggcaggtgcctgtaatcccagctactcaggaggctgaggcgggagaatcacttgaagccaggaggtgaaggttgcagtgagccaagattacgccattgcactccagcctgggcaacagagcgagactccatctcaaaaaaaaaaaaagcgttaacaaaaaattattactatatttgatggtaataattttggaaagttgactctttggacaaattctttaacttctcttggccttggtttcctcctctgtaaaacagggagactaccaatcttgaaggttgttctgggaattagtgaattaatggaccactttagttccggggtcaggtaagcctctttgagaaggtaatactccagctgaaatctgattgacaaggaagagcatgcctggcagaggaaacagcaaaggcaaaggctccgaggcagggactagcttagtgtgatgcaggttcatgcggagcgcatcgctcctggaggggactgaacaaggagagggtggaagggtgggccgcggtgaggggtctggctgtcaccataagggtactggagagccacagcaggatcaggagggcgggtggggcccattgaccctgcctctgtccccacagtccatggagtcgcaggtggaggagtggtaccgcgaggtgggagagctgcaggcgcagacggcggcgctgccgctggagccggcgagcaaggagctggtgggtgagcggcagaacgcggtgggcgagcgcctggtgcgcctgctcgagccgttgcaggagcgccgccgcttgctgctggcttccaaggagttgcaccaggtggcgcacgacctggacgacgagctggtgaggccagcgcaggggcctggggcggggcggggcggggcggtggggcggagaaggtgggcatggggcggggctgaagatggagacggctgagaccctcccactcatacgctgaaagacgcattcagccgttcactcattcattcattcacactcatttactcactttgaatcattcgttgatttattcatgaagtcactcatttatttattcactcatccatagtttgttctttcctccactcatttatttacttaactattcattcattcactcctctgttcctcattccatcactcaatttcctgatttgctcattcatttgttcactcagttgatcattctagccccagccctgtgtttggatgatagtggggccacaggggtggccaaggcagaccccattgtgccccagagggttcagagtccaacggggaaaacagacttgtccccagacagtgacaattcagggtggttaggaatatgataggaaacaagacctgtatgtgcaaaggccaacggtgtgagcctggcttaagtgcagacagcaagaaagagtatgtcaacagaggagactgagacaggtgtggtggtgcctgttgtcccagctacatgggaggctgaggtaggaggattatttgagcctggggattcgatcccatctcaaagaaaaaaaaaaaacaaaaaatggaggaggctgaatattcaactgggctcttaggcaaggaagggcctgggatgccgtgcaggtttaaagtttagttgcgatgcaggggttcttggatgcattctccccttgacctgcttcctgtgtcctctccaggcatgggttcaggagcggctgccactggccatgcagacagagcgaggcaacggtttgcaggcggtccagcagcacatcaaaaagaaccaggtgagcagagccaggtgagggagcgagttaggacatttggatacatgtgatagaaacagctgaaggtggttaaagccaaaacaatgaatgtattggcttttggaattaacaagactgtggacagcagatacagatgtatccaggtgcttccatatattttcatgactcttggctctattttttttttttttttgagatggagccttgctttgttgcccaggctggagtttagtggcacaatctttgctcactgcaacctccacttcctgagttcaagcgattctcctgcctcagccatccaagtagctgggattacatgtgtgcaccaccacacctggctaatttttgtatttttagtagagatggacggcggggggtggggtgtttcaccaggttggccaggctgggctcgaactcctggcctcaagtgatccactcgcctcagcctcccaaagtgctgagattacaggtgtgagccaccgcgcccggcctgtttgtttttctgcatgagctttcttcttaggccagtcctcctctcctggtgataaaaggcctccagtggattcaggtttacctcccaccagcaaaactgaagagaatttcccacctcaataatgtcagcagtagtctcaggaataactctcattggctcaccatgcccatggcatcccacgcccatccctgaactaatcatgatggatggggtttcggactgctccttgggctggcctggttaagcgccctcccctggaacctgctgctggaatcagccttagcttaattaccaaggctgagatggaggcaaagggggtttcccaaaggaaaatcaggggcttgagactagaaggaaggggaatagctattggacaaggaaaaagtaaaacaacaacaaacaaaatcacaaaacatcgagttagcctggtgtgatggtgtacccctgtagtcccagctactctggaggctggggagggagggtcccttgagtccagaggtcaaagctgcagtgagccttgaacaccccactgcactccaccctgtgcaacagaatgagaccctatctctctctctctctcacacacacacacacacacacgtcccccaaaacaaacaaacaaaaacacccatagggacaaaggacagagataatcagcaagaggatactactgccccctaacctgagcaaggtgggggagggggcctttgagctcctaaaaaatctctgaatctgttcattcctctggggctcagtttccacatctaaagtagagttggtttagagcagtggttctcaaactgcatacgaagggaaccccttggtcaaagcaactatttcaccaaagcctaaagcaagacataaaagaggaataataataataaggcattgtgccaggtgtggtggctcatgcctgtaatcccagcactctgggaggccaaggcaggatgatcacttgagcccaggagtttgagaccagcctgggcaacatggggaaaccccgtctctaccagaaatacaaaaattagctgagcatagtagaaggtgcctgtaatcccagctacctgggaggctgaggcaggagaattgcttgaacccaggaggcagaggttgcagtgagccaagatcacaccactgtactccagcctgggtgacagagtgagaccctgtctcaaaaaaaaaaaaaaaacatcgattaaagatttactaagtgctggctgggtgcagtggctcatgcctgtaatcccagcactttgggaggctgaggtgggtggatcacctgaggtcaggagttcgagaccagcctgaccaacatggtgaaaccctgtctctactaaaaatgcaaaaaattaaggccaggtgcggtggctcacgcctgtaatcccagcactttgggaggccgaggcgagtggatcacgaggtcaggagatcgagaccatcctggctaacacggtgaaaccgcgtctctactaaaaacacaaaaaattagccgggcgaggtgtcgggcgcctgtaatcccagctactcgggaggctggggcaggagaatcgcttgaacctaggaggcggaggttgcagtgagccaagattgcaccattgcaatacagcctgagtgtcaagagcgagactccgtctcaaaaaaaaaaaaaaaaaaagattaaaaaaaaaaaaagatttactgtgtgctaagtactgtcttagggtttatgctgattatttaatttaatcccctctataaccctatgaggtagatattgtcattatcctcatttcaccaaacaatgtatgttggaagaatagggcactgaaggatggtggggaggtgggtctacagattattttggaagcttcctgatcattctgcagtaggtagagttatttaagagactggagttttgctgagattttgttttcctgtcttgatgaaaatactcttggctgtcaacagtgtgggcgacagaactggcttatcgttgtcatggttgaggaaactgatcaagtgcacttagtacttaaaattgggggagctcagctgtgtgtgcagtgagagtgctggatacacaggggctgttaagccaaaaatagctgcaaatatgatgcatttggtgcatgcagactcagttccaagtgctccatagtttatcaccttataacaaccccgcaaggtagattatctcagcctgatactagctgtgtgaccttagcaaattcctcaccctctctgtgcctcagtcttctcatctgtaaaatggagatggtaatgttgtctggctccataggttgggagtgaggaggtgtgaggctatattatgtaaagctcttacttagcaaagcacctggcaggtagcagggtagcagacactcaagaatcgttggctggccgggcacagtggctcatgcttataagcctagcactttgggaggccaaggtaggaggatcgcttgaggccaggacttcaagaccagcctgagtaacatagcaagacctcgtctctccaaaaatattttttaaaatagcagggcatggtggtgcacacctgtagtcccagccgcttgggaggctgaggcaggaggatcacttgagcccaggagtttaaagctgctgcattccatcctgggtgatagagtgacaccctgtctctaaaaaagcaaaataaggagaggacttgctggctgttattatctttatcagttgagtcacacaaaaagttaaataacgttaaggcacacaaaaagttaaaaaagactcacaaaaagttaaataaggtactctgtaagtaaataaggttaaggcacacaaaacgttaaataaggtactctgcaagtacagagctggttgagggaaccttctgggggatggaagtgttccgcacgctgatctgggcacaccggtgtatgtgtctgtacaaatgtgtgcaactgtatacctaagatttgtgcactctaccgtatacaaatgatacctcggctgctaagctgcagggtttctgtattagggcccatcttgggtcggcaagcggcttggctcagagcacagtctctggaaccagcctcctgtgttcaaatcctgtcactccttactggctgcttgttcttgggcgccgtacttcgcccctctgtgcctgttttcccacctgcagcaagcatagggttatgatgagtgagggagtatcagcaaaatgtttacatggtcttggcacgtggttagcgagctgggggtgcttgttaattgccccgtgggccgtgccagtagcagaggagcgtgtggtcttgcagggcctcggaacgccccctctccacccacatccccttacctcctgcccccagggcctgcggcgggagatccaggcgcatgggccgcgcctggaggaggtgctggagcgcgcgggcgcgctggcgtcgctgcgcagcccggaggcagaggcagtgcgccggggcctggagcagctgcagagcgcctgggccggactgcgggaggctgccgagcgacggcagcaggtgctggacgccgccttccaggtggagcagtactacttcgacgtggctgaggtggaggcgtggctgggcgagcaggagctgctcatgatgagtgaggacaagggcaaggtgcgcccgagctgggggtgcggagggcctgggggcgctggagccgggggccgccgctgccgcctcatcgtgggcgctttgtgcccccaggacgaacagagcaccctgcagctgctcaagaaacacctgcagctggagcaaggcgtggagaactacgaggaaagcatcgcgcagctgtcgcgccagtgccgggcgctgctggagatggggcacccggacaggtgggcgggcgcgtggccagttcacaggaatggtccagcaggacctgaagcttcgctgttgggagttggcgcagcgctggaattggacgttgggtgggagaggtcctccttgctgtgtgctggagccctcgaatttggcaagtgggcgggccggaatggggggacacggctcagggatggttgagagggtggggccaggagcacctggatttgagtgtagtagtggggaccttgtcgggggagaaaagagtaggcgatgtctaggactggggtagagaagaatttactcaggacaggcaaggggctctttctactcagtgtctgggaggacagaaaagcctgtgctgagattggctatggcggtggggctggagacctcctggtgcagtggggtgatgttgcctcgtgtaggcggatgctgagctccaggcctggaccagggatggaatctgtaaggaggtacagagagagacctctgtccaagtgggctcagagattggggctagaggtgggatgcattggctggggacccaacctgggagtccagagtcccaccgaggttcctggataggaggggcgtgagactgagatagaaaccgggtgaggctgccgaggtgggcggatcacttgaggtcaggagttggagaccagcttggccaacatggtgaaaccctgtctctactaaaaataaaaaattagctgggcatggtggcacgtgcctgtagtcctagctactggggaggctgaggcaggagaatggcttgaacctgggtggcagaggttgcagtgagccgagatcgcgccactgcactccagcctggtgacagagcaagactccgtctcaaaaaaaaaaaaaaaaaaagaaaagaaaaaaaaagaaaggaaactgggtgaggctggatagaggtgagcttatccatttagggaagcggagctttccctgcatgctgaaatgcagggctttctgaacccaagacttgcagaaaacagagtcctggccaggtgtagtggctcacacctgtaatctcaacactgggaggctgaggcaggaggatcgtttgagcccaggagtttgagaacagagggaacatagtgagacctcatctctacaaagaaatcaaaaagttagccaggtgtagagtcacgtgcctgtggtcccacttgggaggctgcaatgggaggattgcttgagcatgggaggtggaggctgcagtgagttgtgatcacaccactgcactccagcctgagcaacagagcaagaccctgtctccaaaaaaaaagaaaaaagaaaagaaaacagagctctacctggggacacagccgtgtctgaagattccaaggaaacacagccctgtcctggggagggggtttaggggggtcacgctctgccccagaagtctcaggggtccatccctgcccctccatgtcccccttcagcgagcagatcagccggcggcagtctcaggtggaccgcctgtacgtggcgctcaaggagctgggtgaggagcgccgggtggctctggaacagcagtactggctgtaccagctcagccgccaggtgagcgagcttgagcactggattgccgagaaggaggtggtggctggctcacccgagctcggccaggactttgagcatgtctcggtgagcatcattagtaataagtgataccaggagctaccactaaggttctctgggccttagtttcctcatctgtagtatgaggataataacagcacccgcctcatggctctgctgtgagacaaatgagttaatataacgtaaagcactgaggaccctgcttggcacacatgctgcctcacacagtgttggttattattatcagcttattattttattgttacttattgttatttttattgttactgttttgttactattcttgccaggtgttcagtaagtgttagatattattttttatgatgatgatgatgatgatgattatcattactcttacctgccacaaaatggtagcctctgccaggtgtggtggctcatgcctgtaatcccaacactttgggaggccaaggcaggtggatcacttgaggtcaggagtatgagaccagcctggccaacatagtgaaaccccgtctctactaaaaacacaaaaaaatcagctgggtgtggtggcacatgcctgtagtcctagctgtttgggaggctgaggcaggagaattgcttgaactggggaggtgaaggttgctgtaagtggctattgaaccactgcacgccaacctgggcgacagagcaagactctgtatcaaaaagaaaaaaaaacattgtaggctggagggggctggtgtatgctgcccctttgctcactttgctgtacccccccccccacttcctgatggcaggtgctgcaggagaaattctcagagtttgccagcgagacaggtatggcagggcgggaacggctggcagctgtgaaccagatggtggatgagctgatcgagtgtggccatacagcagcggccaccatggccgagtggaaggacggactgaacgaggcctgggctgagctgctggagctcatgggcacacgggcccagctgctggccgcctctcgggagcttcataagttcttcagtgacgcccgagagcttcagggacagattgaggagaagcggaggcggctgccccgcctgaccaccccgcctgagccgagacccagtgccagttccatgcagcggaccctgagagcctttgagcatgacctgcagctcctcgtgtcccaggtggggcgccggtggccatcagggcaggtgggagggcctggacagctgtgggcagcagagtgggcaaaaatcaggctgtggagcaggtcgaaattaggcagtggcacagacagaaagcggactacagaacaggaagaaattagataatggagcagatagaaaatggactgatggaatgatatatagaaatcaggtattggcagggaaaagtggtaccttagaaggtctcacagatattaaacagcttctggctgggcgtggtggctccctttgggaggccaacgcaggcggatcatctgaggtcaggagtttaagaccagcctggtcaacgtggtgaaaccccatctctactaaaaatacgaaaattagccaggtctggtggcgggcacctgtaatcccagctacttgggaggctgaggcaggagaatcacttgaacccgggaggaggaggttgcagtgagcccagatctcgccattgcactccagcctatgtgacaagagtgatactctgtctcaaaaaaaaaaaaaaaaaaaaaagcttccaatagatattgggcagtggttctcctaaaactgtgagttttgcctaaatccagatcaagggtctaaagggaattttgagaagtctgagaggaatttggctgtggtgtagatagaaattagacgacagacaaggccaggtgcggtggctcacgcctgtaatcccaacactttgggaggtcgaggcgggcagatcatgaggtcaggagttcaagaccagtctgaccaacatgatgaaaccccgtctctactaaaaatacaaaaattagcaggaatggtggcgggcacctgtaatcccagctacacaggagactgaggcaggagaatcgcttgaacccgggaggcggaggttgcagtgagccgagatcgcgccactgcactccagcctgggcgacagagtgagactccatctcaaaaaaaaaaaagaacttagataacaggtctctgatggaaatcatatgacttttctgaaattaatttgatgggggcgaatttaatgaaaaaggcaacagagatattagaaattaggcagaggttctggccagaattcggatgtggatctgagcagtcagatggaaatgaagctgcaggcccaatacaactcaggcagcaggaaattgggttgcagttctaatggaaggtagaagttgggcaatttttgtttgtttgtttgtttatttttgagacagggtctcactctgtcacccaggctggagtgcagtggcgcgatctcagctcactgcaccctctgcctcccaggcttaagcgattctcctgcctcagccttccaaatagctgggattacatgcacgcgccaccacacctggctaatttttatatttttagtagagacgggatttcaccatgttggccaggctggcctcgaaatcctgacctcaggtgatctacccgtctcggcctcccaaagtgctgggattacaggcatgagctactatgcccagctggcaattattattattattattattattattattattattatgaggcagagtctctctttgtcacccaggctggagtgtagtggtctaatctcggctcactgcaacctctgcttcccgggttcaagcaattctcccacttcagcctcgagtagctgggactacaggtgcaagccaccacacccagctaatttttgtatttttagtagagatggggtttcaccatgttggccaggctgatcttgaactcctgacctcaagtgatctgcccgccttggcctcccaaagtgctggggttataggcatgagccaccgcgcccagcccagttattttttataaatcctacaaatgacttagaaatcaggctgagagattcatagtaataagtggtggatctgttagagatggggaggtcacaccaaaataaatcaggagattgaaccaacagagtgagcagcaggctgagcacagtggcttatgcctataatctcagcactttgggaggccaacctgggaggattgcttgagcccaggagttcaagatgagcctgggcaacatagtaagactccatctctattacaacatatatgtatatatcctgatacagtggcatgcacctgtagttcagctattagtaggctgaggcaggaggatcacttgagcccgggatgtcaaggctgcagtgaattgtgtttgtgccactgcactgcagcctgggcaacagagcaagaccctgtctcagaaaaacaaacaaaaaacccaaaacccaaaagatagagtgagcagagctcatacagcagaatgaatggaaattgggcaggggagtaatggcaattgaacagccgtcgtgtaggaaactgggctactatgaaggagtgggtttgaaataaactgagttaaaaaaaaattagcacatctaaaagacatcaaagtggaaaggggtttcctgaaagacccaaggtaggggtgggcctgcctgaaaacacaggtggcagacccaatagaaataaagctctcagaccaaaagaaatcaggcagtgggttgaaagagatgtggtagtagatctaaaagaagtcagaatgcgggtaagtcaaagagaaatcaggcagcagatatgacaggagcctggctgtgggatcacagtgtgaggctccttatatcttgaggttctgcgctggagcagatggtgggagggagggcacagcctgggccccgtggagggctggcgcccgacctggcatgcccttcaggtacggcagctgcaggagggggcggcccagctgcggacggtgtatgcgggtgaacatgccgaggccatcgctagccgggagcaggaggtgctgcagggttggaaagagctgctgtcagcctgtgaggatgcccgcctgcatgtcagctccacagccgacgccctgcgcttccacagccaagtccgcgacctgctctcctggatggatggcatcgccagccagattggggcagccgacaagcccaggtgcccctcatccctcctcgggcttcctgcctccccctggtggcctaccccagccacccccagcccattgacagcccccttctcaatggaatgacaacagccaatatctgtgtggcgcctctgtgtgctaggcactgttctaggtgcttcgtgtgtattcagaccccttttttaggcctgtcattggggacttcggtcatggggcatccttctgtccgctgtccttcccagttgcctattattaccctctccatgggatgtcacagcatgaaacaggctaaagacaggatgggcaagggaggtgtgggactgtatttgtgagggtgggtgaagaattctaacaattccagcatctcagtggcttcattagtgggcatgggcttattgctcacatagtggttggatgtgagtgtccagcagaatcctgtcccctggtgattgggagccagggtccttccatcatgccaccctgggagtcacatgctggaccctctgcatcccgctgcagatgggaaaagatagcaggaggatcacacagaaggttttagggataaagccggcacccacacactgccagcccggtggcctaacctgtctgccagggaggctgcaaatttttttttctcttgagatggagtcttgctctgttgcccaggctggagtgcagtggcacaatatcacctcactgcaacctccgtctcccaggttcaagcgattctcctgcctcagcctcccaagtagctgggactacaggcgcccaccaccacgtctggctaattttgtatttttagtagagaaagggtttcaccgtgttggccactctggtctcaaactcctggcctcaagtggtccacctgcctcagccttccaaagtgctgggattacaggcataagccaccgtgcctgacctaggctggaaatttagtttcatggtgtggctaggaagaaaaggacctagggaatcagggacacctggcattgcttctgggaatgcagatcctgcagcctgcattcatttactcagcaaatatgtattaaatgcatatggtgtgccatgtggtgagcaaggccaagcacttgccctgagacagattgcattctcatagcacttattactttctgaaatatagcatggggatggggcacagtggctcacgcctgtaatcccagcactttgggaggctgaggcaggcagatcacctgagctcaggagtttgagaccagcctagccaacatggcaaaactccgtctctactaaaaatacaaaaattagccaggcatagtggtggacacctgtaatcccagctacttgggaggctgaggcaggagaatcgcttgaacccgggaggtggaggtcacagtgagccaagatcgtgccactgcactccagcctgggtgacaagagcaaaactccgtctcaaaaaaaaaaaaaagaaaagaaaaaaaaatgaaatatagcgtgggtatatatacatacataggaagggaatgatagctggcaaagtctctctgaggatgtgcgtttgactggagacctgaatgaagtgatgggtgagtcaggtaaagttttgagggaagagttttctaggtggagggacccacaagtgcaagggcccagaagtgggctgtagttaggcatgtgtgaggaaaagctagagatcactgtggccagatggagggagggagtgagggagtgtagggtgagaggaagtgagtacagaggggcactggggccctggaaaccacacatggtgaggagcatgccttctctatgaggaacgtgggagccatgcgagagtttagagcagagtggagtgatgtgatgtgtacatttgagaaaaataggccgggcatggtggcttatacctgtcatcccagcactttgggaggccaaggcgggtggatcacttgaggacaggactttgagaccagcttggccaatgtggcgaaaccccgcctctactaaaaatacaaaaattagctgggtgttgtggcatgtgcctgtagtcccagctactggggaggctgaggcaggagaattgcttgaacctggaaggtggaggttgcagtgtgctgagatcgtaccactgcactccagcctgggcaacagagcgagactctgtgtcaaaaaaaaaaaaaaaaaaaaaaaggctgggcacagtggctcacacctgtaatcccagcattttgggaggctgaggtgggtggatcacttgaggtcgggagttcgagagcagcctgaccaacatagagaaacctcatctctactaaaaatacaaacttagccgggtgtggtggcacatgcctgtaatcccagctacttgggaggctgaggcaggagaattgcttgaacccaggaggcggaggttgcggtgagccaagattgtgccattgcactccagcctgggcaacaagagcgaaattccatctcaaaaaaaaaaaaattaaatatacagggaagtaaaggtaacccacatgtgtatcgtgaacacttggcttgaacaaccatcaacatttggccaatctagccaaaagaggtggctcacgcctgtaatcccaacactgggaggccaaggcaagaggatcacttgaggccaggagtttgagactaccctacgcaacatagtgagaccccatctctacaaaaaagaaaaaaattagtcaagcatggtggtgtgcatgcctgttgtcccagctacttgggagtctgagggaggaggatcacttgagtccaggagggtcaggctgcagtgagccatgattatgccatttcactccagcctgggtgacagagcgagattctgtcttaaaaaaaaattttttttttttaattagctgggcattgtggtgcatgcctgtagtcccagctaccctggaggctaagccaggatgatcacttaagcccaggtggtagattcaaaccatagcatgaagctatgattgccaactgatggaaccttcagaaacttggaatttgttttggacataagatggcttagaatggtgctgtccaatagttatataacacgagccacaaatgcgagccacatatatactttaaaatcttcttgtggccatactaacaaagcaaagcaaatgaaacttaattttagtaatacatttttatttaacctgacatacccaaagtattatcacttcaacaggtagtcaatattaaaactattaatgaggccaggcagtttcgaacttctggcctcaggtgatccgcccgcctcagcctcccaatctcagccaagcggagatcgcaccactgcagtccagcctaggtgacagaaggagactccatctcaaaaacaacaacaaccaaaacaaagaaacaaaactattaatgaggccaggcgcagtggctcatgcctgtaatctcggctgagattgggaggctaaggcaggcggatcacctgaggccagaagttcgagaccagcctggccaacatgccaaaaatccatctctactgaaaatacagaacaaaaaattagccaggcttggtggcgggcacctgtaatcccagctactcgggaggctgaggcaggagaattgcttgaacccagaaggtggaggctgcagtgagccaagatcacgccattgcactccagcctgggcaagaagagcaaatctctgtctcaaaaacaaacaaacaaacaaacaaaggctgggtgcggtggctcacgcctgtaatccctgcactttgggaggcctaggcaggcggatcaactgaggtcaggagtttgagaccagcctgacaaacatgttgaaaccctgtttctactaaaaatacaaaaaaattagccaggcatggtggcaggtgcctgtaatcccagctactcaggaagctgaggcaggggaatcgcttgaacctacctagaagggggaggttgcagtgagcggagatcgcaccactgcacaacaacaacaaaaaactattaatgagacattttacattcttttttacattaactccacaaaatctggtgtgcattttacactttacaccaaaattcagactggccacatttcaagtgctcacatgtctagtggctactgccttggagagcacagacttggaacgttaaaatcattggctagtggaaccttcagaagcatagctagaaaaagtttgaaaatttggatcttggctgggtgtggtggcttatgcccatagccttgaactttgggaggctgaggcaggtggattgcttgagcccaggggtttgagaccagcctgggcaacatagcaagaccctgtctctacagaaaatgaaaaattagttgggtgtgatggtgtgcacctgtggtccccgctactcaggaggctgaggcaggaggattgcatgagcccaggaggttgagactgaagtgagctgcaatcttgccactgcactccagtctgggcaacagagcaagaccctattaaaaaaaaaaaaaaggaaaatttggatcttgaaatcctagaaggttagaatcaccaaagtgtgaaattttagaaacttggaaaatttgaatcattgaattagtgaaccatggaccctcagaatttggtcatcgaaagtaggtgtctcagtctggtttggtgactcaacgcctgtaatcccagcactttgggagactgagatgggaggatcacctgaggtcaggagttcaagaccagcctggccaacatggagaaaccccatctctactaaaaatataaaaattatctgggcgtggtggcaggtgcctgtaatcccagctactcaggaggctgaggcaggagaatcgcctgaactcgggaggtggagtttgcagtgagccgagatcgccccactgcactccagcctgggccatagggtgagactttatctcaaaaaaaaaaagaaaagaaaagaaaagaaaagaaagtaagtgtcttgaggtggtatgggatgtcagcctcaaggatttggggtcaccaggagccacatgtatggggcaggctgaggaggctccctgtggctcagatccctgcctgccacccactgcagggacgtgtcatcagtggaggtgctcatgaactaccaccagggcctgaagactgagctggaggcgcgggtgcctgagctgaccacctgccaggagctggggcgatctctgctgctcaacaaaagtgccatggctgatgaggtggggagcagggagggggtccccctctgccacccgggcacattggggtggaagccattccacaccctgacttccctcccacccacctgccactcccagatccaggcacagctggacaagctgggaaccaggaaggaggaggtgtcggaaaagtgggaccgccattgggagtggctgcagcagagtgagtgggggcccaggcacacgtggttcaagggcacagggacatgctccagcctgtccagccaaggcccagagggtgacaggagcatgctttgcaccctacccatgggtctccagaagcaaacataagggcctggaagggtggacaagggggctgccttgccattgaatacccacccttgaaaaaaaagtcttaaagtcctgggtggggggacattaaggaaggaggaatgggagtcagaaaggaggaatgatgcccactgaaatagccccagcctctgccattcctgcagagcccaggatggtcagggctcgggtatggaaagccggaggggtgtggaaggccaggggaacagccattgcccccaggaagggccccagatgccccagaatccttaccctgcatgcccctcctcagtgctggaggtgcaccagtttgcccaggaggcggtggtggctgatgcctggctgacagcccaggagccgctcctgcagagccgggagctgggcagcagcgtggatgaggtggagcagcttatccggcgacatgaggccttccgcaaagcggctgcagcctgggaagagaggttcagctctctgcggcgcctgaccacggtcagctccccagatactgccccattacccccacccccaccaagacccccacacccatggctctatatgagacagacacaccgagacatggtgcttggtcctgtgttgtgtgagtgccaagacagactcttgctaggctcccagtggagcagagggacagacctgtcaccagtgacagcccagaatgtcagggatgtgataggggaagaacaagcagagggatagtgcctgggatgggggagtgggagggggaactggcctgggggattctattctgagacttgaataattaggtgaagagaatgtagtaataaaaaggattaggccaggtgtgacggctcatgcctgtagtcccagcattttgggagaccaagatgggtggatcacttgaggccaggagtttgagaccagcctggccaacgtggtgaaaccccatctctactaaaaatgcaaaaattagctgggcgtggtggtgcacgcctgtaatcccagctactcgggaggctgaggcaggataatcacttgaacttgggaggcagaggttgcagtgagccaagatcgtgccactgcctgggtaacagaacaagactccatctcaaaacaacaacaacaataaaaaaaaaacaacaaaaaaaaaccgcttaaaggctgggtggggtggctcacacctgtactctctttggaagcctaggcgggaggatcacttgaacccaggagttcaagaccagccttggcaacatactgagaagccgtctctaccaaaaccaaaagcaaacaaagaaaaaacagccaggcgtgatggcacgtgcctgtagtcccagctactcagaggggtgactgagactcgaggatcacttgagcactggaggtcaaggctgcaatgagctatgatcttgctgcttgcactccagcctgggcgacagagcaagactgtctcaaaaataaataaataaataaataaataaataaataaataaataaataaagtcttaaagtcctgggtggggggacattaaggaaggagaaatgggagtcagaaaggcacgcagagcaattgatttacccaatttttaaaaaagtgatttagccaattcttaaaagagcaataggtgtttgccggagagaataggctttaagttcttggcagagagcaaagcatcgcacaggcctggacaccttgctttttcaaggaactggtcaattgagtgatgaggcagaaaaacccaggccgcctccccggacctcccccttaccccgccccggccccacgcctccaacctaaccctggtccctccatcctcagatcgagaaaatcaaagcggaacagagcaagcagccgcctaccccactgctggggcgcaagttctttggggaccccacggaactggcggccaaggcggcgcccctgctgcggccagggggctatgaaaggggcttggagcccctggcccgccgagcctcggacacgctctcggccgaggtgcggactcgggtggggtatgtgcgccaggagctcaagcccgagcgcctccagccgcgcattgaccggctgccggagatcccggggagggtggagcccgcggccctgccggccgcaccagaggacgcggcggagacccccgcgacccccgcggcggcggagcaggtgcggccacgaccggagcgccaggagtcagctgatcgcgcggaggagctgcccaggaggcggcggcctgagcggcaagagtcagtcgatcaatccgaggaggctgcgcggaggcggcggccggagcggcaggagtcagcggagcacgaggcggcacacagccttaccctgggccgctatgagcagatggagcggcggcgcgagcggcgtgagcggcgcttggagcggcaggagtccagcgaacaggagatgcccatcagaggagacctggtcaaggggtgaggtgcccgccttatgaccagaaagtgaggggaggggaaagcggagagctcctagaacccctcaggcccagtgaaagggcttcagggctcagaacttcccaaagaaggagatatcgccgcggtacccattttgcagaggtgtaaactgaagctgcaagataatcgatgtgcccattgttacacagaaaggggagcccttcctgttgaaagaaaaggcagactgcctttctccagacgtaggttctcggcccctgggttgtgactcctgcatcaagtctcccgggtgccccgaggcagggattttgtcctctctgtgcctcagtttgcccactgggctaatggtggaaccctcacctccttgattggagaggagaccctttatcacaattctctcagcagccttatgaagtgggggctgttgtcttctccattgtatgactagggcaactgaggcacaaaaagggcaagtcactcagcttaaacgaaccaggactttcagaatccagagttggccagtgtgtgttgtgcagatctgtccagtcagctgagtgtgtctccagaaagaggcctttggtcaggagacaatgacttcttgattctttttaaattgcacatttcatgaacatttgctgagtgcccactctgcctggcatgtgctgagtcgagcggtgactgaaccagtcccatccctgactttagagactcacagtccattgggaaaaacaggcttgtcatcaatgatgaccgagaattatctgggctggaatgggggcgattgggggactggagagtcaggggtgggtggagaaaggcaacgtttgcaagttgttctttgtgctgcttaaaattcaaaggggcatctgggcgcggtggctcacgcctgtaatctcagcactttgggaggttgaggcgggcagatcacttgaggtcagaagttcgagaccaacctggccaatatagcaaaaccctgtctctactaaaaatgcaaaaattagccggcatggtggcgcacgcctgtagtaccagctacttgggaggctgaggcaggggaatcgcttcaacacaggaggcagaggttgcagtgagccgagatcatgcaccactacactccagcctgggcaacagagaaagactccgtctcaaaaaaaaaaaaaaaaaaattcaaaggggcgagaggtttggtcttccattcagcagacacgtcccaaacacctgtggtacctaaggcgagcatctgagagaaacagctgcagaagtgggcaggggcctggcacttccagctaagaagtggaggctcctctgcccagccagacaggtccatgggagaaggaaccctggtttcactgggtctttctgtcccccatcccccaggaaggccaccctggctgacattgtggaacagctgcaggagaaagaggcaggcccagggctgcctgctggggtaagttgagcctcggatgggtggggataggaggacccctttttcagagcaggaggcaggatctcagaaacagccagtgcctagccctggcaggacccattccctacctggaccctgcagagacagcatggactctcagggtccccagaatctgaaaatgtcccccttagaaagacggggcacctacctaagagacccctactgcccctccacacacacacacacacacacacacacacacacacacagacacacacacacagacacacacacacagacacacagacacagatacacacacagacacacacacacagactcttcccacatctgtcctggactccgtatttcttcagctcagtggggtcccaaatttcttcatagcctcatacacacacacacagaaggaagccccaggtttctcctgcagacagtggggacacgccctgcttgcacccccacctccagagatctggctgcctctttccaccaccgagagagattccaaaccaatgagtcctaacagactcactcccaagacccatggggccctaagaattgggcctccaaccctgaggtcctcccatactcgcctccgagacaaatggccctgtagacagatgggaccccagacccatgactcccccaaacagatgacccccacaccctctccatggacagcacccctcttccccctcccttcacacagccgtcgctgcctcagccacgcgagcttcccccaggtcgcctgcccaacgggcttgagctgcccgagcggacacctcggccggaccggccccgggcgcgggaccggcccaagccgcgacggcggccgcggcccagagagggtggtgagggcgggggaagccggcgctcgcgctccgccccggcccagggcggctccgcccccgcgcctccgccaccgcccactcacacagtgcagcacgagggcttcctactgcgcaagcgcgagctcgacgctaaccgcaagtcgtccaaccggtgagcgtgtgggcggggctttggaaggcgggtctcaggctcagggtgaccattgcgtggagcggtgggactgaggagggggtgtggctcaacttcaggccctccagcaggtggcggtagtaggtggggccagagctggggggtggtggtggcttaaatcaagaaagccaaccaatgagcaggagggggtgtggtttaacgtcaggccctccaacccgtgggggtagtaggtggggccagatgaggggtggggctcaactttgatgattccaaccaatgaacaggaaggggcaggacctaaggttagtgcatctaatggatgatgggtagagcttaggtgggaacagaaggaaaatgttctgaaagtgagtaaattggaacctaacctcttagcaaccaacccaggagttgatcagctaaatagcaaagagggaggcatctagttgagaaggtttcaatggcttgtcgtggagcttggagaggtcactcaaccaatgagtggggtgggtctacccttgaagtttcaaattgggggagggtccgaaaacgggcagagcccaaactaatgagggtaggggttgggaagggggagtcatctcttacaggtttccaaatgagggtctagccatgatgtgcctgctcttggggagtccagctcctgcttgtccaccctctttttgtccaactgagaggcagaatctggggacaagtggagccaaaaaggggtatcaccggccagtaatggagtgagtcccaagatatgaagtgggcaggacagattcagattttgctagtggaatctgtaggtggtctttcttcctcgtacctaatgccaaggtaggaataaacaagggcacctagtatgttttgctttgggagggattcctccaggatcgaggctttggatgactggagagacaggaattctttattccagacagtagaccaatagactttccttgagaaagctccatgagtggggaggattgagtggagcaaaggcttatggaggagacagcttaagacttaccttcaggaaattcagtatgggaggggataaggaagggaaatctcagcctgggcaaaggcttgatactgagagacttaaatgctcccctcagggcagcaacagccttaaggaagagcattttaggtccaactagggcgcaactagggcgcaaaggtccagaggtaggaaggctcagacatattcagaccttgaggatgttaatgaagagttattaggcagagtgctgcggctctgccttgagccccatcttgtcgctccaggtcgtgggtgagcctgtactgtgtgcttagtaagggggaactgggcttctacaaggactccaagggcccggcatccgggagcacacacggtggggaaccgctgctcagcctgcacaaggccaccagcgaggtggctagtgactacaagaaaaagaagcatgtcttcaagctccagtgagccccccaatgggcaggagggagggatccaaggctcagcttcaactcccagtgggaccctggcttccctgggggacacttggtgggcaggtgggctgggccccttccccagatctctgaagtcctgtgtcccttcctgcaggacccaggatggcagtgagtttttgctccaggcaaaagatgaggtgagatctggtcctttcctccctctgtgtggacctcagtaatgacctggctgtctggctcctgacccagagtgatggggctgtgagaagggacactcacaggccagagttatcagggctgtaatgggaaagcccacaggcactgagagcccaaaggaggttcctaacccagtggggagtgggaagggcttcagggagggctgcctgcagatcctgatgacaaagtccaacatctttgccgtggtcactcaggtgagactggaatggagggagttcgctttaaaaaggggtgatttggccaggcgcggtggctcacgcttgtaatcccagtactttgggaggccaagacgggcagatcacctgaggtcaggagtttgagaccagcctggccaacatggtgaaaccccgtctctactaaaaaatacaaaaattaactgggcatggtggcaggtgccttaatcccagctacttgggaggcagaggcaggagaatcgtttgaacctggaaggcggaggttgcagtgagctgagatggagccattgcactcaagcctgggggacaacagcgagacttccttcgaaaataaaataaaaataaaaagggtgattcagagggacagtgggggtctaaaaaaaggagtgattcaggttgggcaccatggctcaggcctgtaatcccagcactttgggaggccaaggcaggagactgcttgagcccaggacttcaagatcagcctgggcaacacggaaagatcccatctctatgggtaataataataataaattagccgggagtggtggcacatgcctgtggtcccagctactcaggaggccgagtggaaggatcacctgaaccagggaggtcaaggctacaatgagctgtgattgtactatggcactccaggctgggtgacagagtgagattctgtctcaaaaacaagagggggtgggtgatctaggtagagggaactgcaagtgcagaggaccagaggtgcagtattgcaaagggttaactgctggagggcagagttcatggaagaaggtcccagaaaggttcccaggagataggtgtctcaggacaggatgggccatttggaggagattggattttttacctaagggcactggagagctaggggggattacagtgatgtgtaaaaaagattcctggctgggcgcagtggcttacgcctgtaatcccagcacttcgggaggccgaggcgggtggatcacctgaggtcaggagtttgaggccagcctgaccaacatggagaaaccccatctcttatggtgcatgcctgtaatcccagctactcgggaggctgaggcaggaggattgcttgaacccggaaggcagaggttgcagtgagctgagacagcgccattgcactccagcctgggtaacaagagcaaaactccatctcaaaaacaaaataaacaggccgggcatggtggctcacgcctgtaatcccagcattttgggaggccgaggcgggcagatcacaaggtcaggagatcgagaccatcctggctgacacggtgaaaccccgtctctactaaaaatacaaaaaaattagctgggcatggtggcgggcgcctgtagtcccagctacttgggaggctgaggcagaagaatggcttgaacccgggaggtggagcttgcagtgagctgagattgcgccactgcactccagcctgagcgacagagcgagactccatctcaaaacaaaacaaacaaacaaaacaaaacaaaacaaaacaaaacaaaaaaagattcctttggctacctgggtgggtagcccaggccgcggccagggcagggacccaagtgggagagcgcatggctgggccacacaggcctgtggggagaggaggaagaggagtctgagagaggcaagcataaaggtggtttgaagagatgttgagagtaataactaacacttgttatctcattcaatcttcacaagatgcaatgaagaagtgggctttttttttttttgagacagagtttctctcttgtcacccaggctggagtgccatggcgcaatctcagctcactgcaacctccacttcccgggttcaagcgactctcctgcctcagctacctgggtgactgggattacaggcttgcgccaccatgcccggctaatttatgtatttttagtagagacggggtttctccatgttggtcaggctggtctcaaactcctgacctcaggtgatccacccgcctcagcctcccaaagtgctgggattacaggcatgagccaccacacccggccagaagtaggcctttacccactacatgccttcttttacttatctgcacaatgaagattaaaaatagtttcttggcctggcatggtgcctcacacctgtaattccagcactttgggaggctgaggtgggcagatcatttgaggtcagaagttcaagaccagtgtggccaacgtggcgaaaccccatctctactaaaaatacaaaaagtagccaggcatggtggcacgtgcctgtagtcccagacactcaggagactgaggcacaagaatctcttgaacctgggagatggaggttgcagtgagctgacatcgagccattgcactccagcctgggggacagagcaagactctgtctcaaaaaaaaaaaaaaaaaagtctcttatcatagggttactgtgagaattaaattgctccatgtttaattgatacatgataaactgatacttagcacagggcctagtaaatatcagtgctctagtagtgcctgcccatattattatcattgtttgtgtcatttatctctgtagtaggaagtatatacaatcctattgcataggtttaagggaattaatccactaaagtgtttggaacagagcctggcacatattgctatgtaactgcatcatcatcatcatccctttttaatagatgagaaaactgaatttcagagagggtagtctgatctgaaattcacctattattccagcttctctcttccaaatacggcctctgtgccctgtttcttcccccaggaggagatgaacggctggctggaggctgtagcttcctcggtggcggaacacgcagagatcgcccgctggggccagacactacccactacttcatccacagatgagggcaaccctaagagggaaggcggagatcgcagggccagcgggcgcaggaagtgacttcccacccccaggacctgacacatctcgtctcccctcttttccgcactgtgggcacaaagacactttttcttccgcaggggcgggagcccctagttccaacactgaggacgcgtgacatggtgggcaccggaaaggaggggacttctcctgcaccccaagaagtggtggggagattgctgcccctatagccatatctcggccccttcccactcaccacccccaccccaggtgctgggggtcccttatttttatgcaataactgagcttgatgggggtgggcagggggccagttgagccaagcccccagccccgatctgcagatcctgccccaagaagctggggtggtgggggcagtaattcctgcccccctctctgccctagggatgggcacgggggcgctggtgaggtcccctggaccatccagggtgctagggggcagggaggggacaccccctccccgcctttacctcacttccaatgctgccttgatctctgtctgggaggggggagtgaaggggccctagccccctgcactccgccgcctcagagccatgcggttaattcctgacttagtttatttttgcaaaacgtcgatctcctcctcccccgccccgcatccgcgaaggcttttaatgggaggggcgtcaaagctcaaaactgttttcctctctcctcccccctccagttgtaaatgccacttcatgaggggaggggcgaggggaagcccacccctgcatgcttctggctggagcacctccctggggagtcgggggattgggttgtgggcagtccccatggccgcctggagaagccgctggggcccgggggtgtggggcggtgtggcgggcgcacactgtatgtacctataataaaccctttggctttgacggtctatggtcctttgtttgggttttctgggctgcgcccgggaggattgaaaggagggctgtggtggctgtaggggtgggtgcggggtggggagaggggcacgggggtaccgtggctgcggagaacatccagatgtacccttttatgtggacttaatttcggggtctaaacacacgccccttgacgagaacctagagggatggagaatatttcgttatgcttcgtaataaacttccccaaaggagactccgggtccgccccgtcaagttcaggaaaggcggacccctttaaggaggcggaaaagttaaccgcgatgggcaggcgctctgtccaatcgctagtgactcctggagtctctggcccaatgagcagcctatggaggcggggtccgggtgcacacccggaagtgggtgcgggccagccggctcgcccgggggccatggcagcagcggctactgcagccgagggggtccccagtcgggggcctcccggggaagtcattcatctgaatgtgggaggcaagaggtgagtgtgggagactcctgaggtcccatcctcgggggcgggaagcggggtgggagtatccgcctctcctgggggaatccctgtccatcaagggttgctccgccccccccccctttggaggcgcgagattctggaaaaacgccgggggagggggaaggggagggaaccctggatcctgcgggagggggacgcattcctcacccgctcctcttcatctcttgcgtccgtttaccttccccgcccagattcagtacctctcgccagactctcacctggatcccagactccttcttctccaggtgatcgggagagcgagtttggggcgagggtaggagggatggagagggcgtgggagacctaatatccactcccccggcccgtgacgcctgctcggtgtcccttccctgcagtcttctgagcggacgcatctcgacgctgaaagatgagaccggagcagtgagtcggacaagaactgaaatgggatgggggggaggggttggtaggaagaggggcaggaccccactcagtcctgccttttaccccatccatcctctgcccccctttcccgcagatcttcatcgacagggaccctacagtcttcgcccccatcctcaacttcctgcgcaccaaagagttggatcccaggttggcatggaaaaaggggagggagtccctcactgtcttcagtccctgaggagttctttcacctcctctgaatgtccacgtgagctccattctattagaattctcattcagaaccttgatcacaggccgggcgcgccgggattgctcacgcctgtaatcccaacactttgggaggccgaggtgggaggatcacttgagcccaggatttggagactagcctgggcaacatagcgagaccccttctctaaaaaagcaaacaggcaaaacttcatgagaatcttgatcatgttaaaattttatgtccttcgatttctccctacacacacaca

SEQ ID NO: 583 - DNA, 78924 bp, Homo sapiens
  source 1..78924: mol_type = genomic DNA
ccgacattctaaaaaggacatagggatgggctacgggcaggctgaggactggctttctgtgagtctcaagggttgctgggctttggtgggtgggtgactcatggaggggcattccctgcagacagtaggcaggttgctgccctctgtctccaaagaggtctttaagagaaggaagcgcaactggggcccctgtgatgactggaagattgtggctccaggacacagtcactaccttcagggatggaagtgaagtgatgctgaggggggagaagagattcagtaacatgccagccctcagccacgcagaacagctggaaggctgcctcggggactcttagaacatgctggaacagtggcacagccttcagaattccgggaaagcctgtaaaacccaatcaggacccatggcatacaccatggtgctctgtgtagcaggtgctgctttgctgtggctgtttgtgcatatgtgtgtacatacctaaagcatagaggtgtcaaatgcattttgtattgttaccactttacgggtttgaaagctgctgcatctagaaaagatgtttgtggccgggctcggtggttcacgcctgtaatcccagcactttggaaggccgaggtgggcagatcacttgagctcaggagttcgagaccagcctgggcaacatggcgaaacctcatctctacaaaaaatacaaaaaaatgtagccaggtgtggtggcaggcacctgtagtcccagctacttgggaggctgagatgggacaattacctgagcccagggaagttgaggctatagtgagctgtaatcatgcactccagcctgggtgacagagggagaccccgtctaaaaaaaagaaaagaaagaaaagatgggtggacccccaccaagggtcatctcactcaaagggcaggaggctgagacccaattcaggggactactggaggtcatcagccctgcttggtttcagggtaaccgtgggctttggtgtcaggcagagctggattcaaacttactggtttgtctacaacctaccagttgtatgactctgggtaagatgcccaacatctctgagttttgtcacttgcctgagtaggtagtgccggtagctacctcaccgatggttgtgagggttaggcaggacacctcctggaatgccaagctgagaactggttttttttgttttgtttttgttttttgagacaggttctcgctctgtcatccaggctggagcgcagtggtgcgatcttggctcactgcaacctccacctcctgggttcaagcgattctcatgcctcagccacccgagtagctgggattactggtgtacaccaccccacctggctaatcccaggggccctgttctgtcctccccctcatgctctgccagctgaaggccagtggctgccagggattccccacctgccaccccacccatcccagcaccttccagatcctccagggtgaagcagagaaataatgagacatcagcctataggaaggagatccaggagaggaaaaagaaacaagttttattaaagccccaaacacttggctagaaaaactgaaaaggaaagagagcagggagcgggggagaagaaaaaaggacattaaaaaagagagacagagaaaacacagcaacccttttccatttagaaattgtcaagttacaccgacagaggtcacagaatatccacagaagccatcactgctacaccaacatgggccctacagggtggatggggcagggtgtggagccggggctcaccccggggggccccctggggaccccactcagagcctcaggcctgaggctcctggggaaacagcatattgtggaaggggcaggaaatcccccatgcgagtaacacagcacagtgggcgggggctgagaggaccaggtacaggggtcccccgagacgtcttagttttctcttggtcaagcacacactgatggacagagcagcgaggcgcatgcagctgggggcactgatgtgctgcaggctgtgagagggccagcggggacgggggctcaggaagggatctggagccagtggtgcagggatgatggaacacacgcacacagaggcacacccacacacttgggtctgcaccagcacacatacctgcacacacacactcggagacacagattacatgcacctccatgtatgcgtctctatccacatgtacgtggcccacacacaagtctctggctctcggcatgtctgcacacacattacacatgttctcacacacaaagctcctctcacgctaacatgcaggtaggcacgtgccaatgcccaaacaggttacatgcacctatgtgcccacgccttcccccacacatgtgctcggccatgcctgtgggtgcaggccccatgcgtctgcacacacagtgcatgggcttgtgccagcacacacacaggctgcacgcaattccacacggatgcctcccagcccataaatgtgcaggaaccaaagagaaagaaagatgcaaatcccactgggcttcacccgagcgggtggggcggggcacgtggctccctccttctgccccttcgtggatggacactgccccccccacctcccccacaaagggacattcaactcaggacaatgacggtggggcacacattccagtcacagggctgagggtgggagctgggggcaagcgaagtagcaagcagagagtaatggagtggagggaggagggggcaccactcccccctcccctcccaagtcagggggtctctgtacagccaaatcaaaccagaccatttcactgggaccacagaagccaggccgacgtgcccgccccccagcccccctcccccgccaaaacagtggccagggagagtgccgtggttttcttttttttttcttttttaaatatttatatatatttatattacgtatattatatatataatatgtaaatatatttttaaaacaatataaaatgttaagacacttcacttaaatgtaaagagttgcctgcaattaaaagtaattgcatcatttatgaggtccttttttttttttctattttccagggtttttttttttttccaggagggattttttttttcctcttttgttatttttcaaaaaggcttgctcgccttggtacaaaaatgatccaaagctagaaaacaaggatgaaccaacaaaggcaaaaacaaaaaaagaaatgaagaaacacaacccgtttcccctccccccaaaccttcaacagctcccagctctccccaggtgcggaccttccccagccaggccccagggtctggggggctctgccttctgcgcagctcctcctttctgtgcttgctatgggggactgattctagtccccctcccctgtgcttacttcactttgtgctccaagtgggaatcctgcggccggggaccccgctcctcctcctcctcttctcctatcctctccctaccggctcctcactgtgccctctggggggccaggagtgagaaccaaaattggcctctctctgcctccccaggacccggccaaaagccaggcggcactgccaaccgcctctgcagggcaggcagggcgtccacaggccaggggcgctggctggatggtcaggcctcagggaccttcagacatctcaccagggtcaccagagccccattgaaaaactacgtctcatcctttcctgggaaaaccctcaaattgccaagaggatgactgaagttcaagtcaccccacctgcgggtcccaggtgtcttcagtgctccccgtcaagcccctctcgaccctcccatttccctcaaaccagacccttcccccaactgcaagccacaaaacctggttttctaggcccctcactcttgcccaccccatccccattcaataagttaatgccatttaaagtgctaaatcaggaaactaaaagtaccaaatacccgtccgggccgccctctcccaaggcagtgtccccgatatccggctgtccgtgcaacccaccctccacagccagcagaccaaagggcctctgccctccactccccactggacggcaaggcccaggaggccagcgcctccccagggatacagactccatggcctcacacccaccctgaggcctctcaaactccggcctcgtctccagcctgtccgtctctactccaggcccacttgggtgtgagtgggaggaggcagagcagccacagaggaagtcacagtcttgtcggagcttagacagggagtggggcatctccaaggccagtctccctaagccccgctctctggcttgatgtatgggttggtccgatgtccccgcgttcctccaggaaggtatcgagaaacgggagaggggtctcccactgctccaagtctccgtggttcagagtttgtttggagtattcttgggaagtgaggggaaggcgggaagggggtgcaggagcttcaggatggactgggggaaagagtggtgaaagagaagaaggagagatgtgacaggtgcggccagcgagaggccagctgggatcaaggaaggtggtgtgtttggtttttagttttactgtttaaaaaaagataattaaaagttaattgttaaaaaaaaaaaaaaaaacaaaaccaaaaacaccaacagatgatgggtaggggtcgctgaggagggccgcaccctcctcttcagggcacacccctcagggcgtctggagagtagggtggggtggggtggagatgaaggaagagaggggagaaatggcaggagtgagggagggggacaggcggggcagcggggtgaggggcttctagaaggagatggaagaattccttgccccaaaggaagtcaatacagggatagaggttctggaagccgagggcttttctgagactgggctcgaggtctcattcgacccgctcatctctttagatggtttagtggcctggaacaaaaacaggggtcaggggtcagagagcggaagggagcgcctccatgctggcccccagctgaagttttaaaagtggaaaacctccacaaatccaaggaaattaactgcaaaaggaagaagccagaggggcatctggagagaggggtcccttgaatggtggaggggtgggggcagaaaaggggggggagggggcacgaggttggacaaagggcctgggtggtcagagggcaggcccatagttactgagagcagagagagaagcagagcgaccagagaagcacagaagaggccgcgcccaggatgggcagatggggaggtgggggtgggggagggcaggggaggggaggaagaagtgaaacattagctgggacaggggcacaagccctgcgggggacgggggtcagggtggggaaaggctcctagtcccaaatggcccgctgtacagccagagccccttccagcttcatcctggtggcaacagaggagggggcttatcctcccaggggggaataaacacttcaaagaccccgtccaccaccaccaccaccaccacctggaaatctgagaagaaggcgctgccgcaccagcctcccgcccagtgcaggaggccccactgcatgccctgcaagcacttgtcgccccagttggtaacaggaggctactccctcatgacttgtcctgccctcactggtcagttctagtggtcagaactgacccctcatcctcctcccaccttcggtggactcccgcaactccaccggtcctggaggcttttcctctgcagctgcggtctccaaagtgcggtttgagagctacgtgcattacctcatcacctccaggggccaccctctggcatgcatcgtgaatgcagattcctgggctcccctccagaatccatctcttgtgtgggctcatgaatgtgcattttaagcaggtgccccaggtgcctctgctgcacacttacctttgagatccactggattaaggctacacagacccaggtttctccttgtaattgtacccactgtccctcctggccttgcttagctactagtgtgagaactgaatcacccagatttaaaaaaagatccaaaagataagacagggcgctgtggcgagtcaccagagaccaccctgaggttaggtctgggcagggtccttcacttccctctactatcaccctgctgctacggagttttctcagatgccttgcagaggagaagctagagtctaaagcaagccctgtctccagcagcctgcccagctcacagtaaagaaccagcgctggctgcaatcaccatttctcctttacaggtgcacagatggttggttccacgattcacctgggttttgctcactacagtgtagtttgccatctacatttcccttttatgagaatcaaaacaagggccgggtgtggtggctcacacctgtaatcccagcacttcaggaggctgaggcaggattgcttgagcccaggaagtcaagaccagcctgggtaacatggcgagacctcgtctctactaaaaaaaaaattttttttaaatagctgagtgtgatggtgtgtgcctgtggttccagcttctctggaggctgaggtgggagaatggcctgagctcaggaggtggaagtggcagtgagccatgactgcaccactgcactccagcctgggtgacagaatgaggccctgtttttttgtttgtttgtttgttttgttatttatttatttaagttaaagcgaaaattccccatttgggttttctttttctttcttttttttttttttttgagatggacttttgctcttgttgtccaggctggagtacaatggcgcaatcttggctcacggcaacctccgcctcccgggttcaagcgattctcctgcctcagcctcccgagtagctggaattacaggcatgcgccaccacgcccggctaattttgtgtttttagtaagacgaggtttctccacgttggtcaggttggtctcaaactccccacctcaggtgatctgcccacctcggcctcccaaagtgttgggattacaggcgtgaaccaccgcgcctggccctgtttgggttttctaacccctctcctctgctcatccattactcaagggagttctagggggtccagggcccagccacagggtcgtcagattcacgcagtcctcagcatgtgtcaggcatggcccctgccctctctgtgcccccagtacctgggcctggagacaaactcatccaacgggaaccagaggctctctgaccactgtgtcacttaccttgggctcagtcctgcctctcctctgctctagcctttcccatttaaagttctttcccccaaagccaggtgagagggaagcactgcccagttccccctgatgtctcttcacacctcaccatgtcccccggcaaggtgctgattctccccggttgtccttttccctctgaactgatctttctaggtaaaagctgctttttctgctcctaccccttcagcatttttcaagagcctcattctattccaagttttggtcttgggaacacttgtcttccggcaccaccacctggcttctgtattcaggcaggtgatgtgccttcacccagttgaggtaccccttctccccccaacagccagtgcaagacctttagacatccagcttcaccagtttatggggatgcctcgtccccgtcccgcttcttcatggagaccacttctgcaacatgtgctttctaaaatcctctcgggtcatcttccctcccgggagactctggacacaccatccacaatccactctcctgaagttgagggagcacgtccagctgtgcccggtgaccccagcctgtgctgctaacccttctcaggtgacacagctgctgtctctgaaggttcctgtcatttcctttcacccatcatcctcccctgctgattccaattatgtccagagaagcagaactttgttaccttcgtggcaaggcagaaacctcacacatgtccagctttcagctgggggaggcatggagcactgagctggtcccagagggcaccaccctgcacacctccctcttgcctggggatcagagccggccacctgctctcgccaggtccatgttcccgaggcccttcacattctgacgcccagatgtccagacaagtgtggaacctctcgactctacagaccccgctgactccacctccagggccattcccagggccaccctccctagcccccatgccctccttccttgctaagccctgcctgggtcaggtattgaaccatcaggagaagctgggctttccccagcccagagtgggggatgtggggatcatgacaaaatctatggcaattggagaaattcctttctccttgccagtgactgatttaggaatgggcagtgagataagaggtgtggtctgttggaggcttctgggaaagattctccagcttctaaaaacagctgtgtgaggccgggctcatgcctgtaatcccagcactttgggaggcctaggcagtcagatcacttgaggccaggagtttgagaccagcctggccaacacagtgaaacgccaactctaccaaaaattacaaaaattaaccaggcgtggtggcgtgcacctgtagtcccagctacctgggaggctgaggcaggaagatcgcttgaatcagggaggtggaggttgcagtgagccgagatcgcaccactgcactccagcctgggtgacagagcgagagactctatctcaaaaaaaaattaaataaataaataaaaacagctgtgtgaagccgggcttggtggctcatgcctgtaatcccagcactttgggaagcttaggtgggtggatcacctgaggtcaggagtttgagaccagcctgggcaatgtgacaaaaccccatctctatcaaaaatacaaaaaattagtgaggcttgatggcgccacctgcagtccagctacttggaaggctgaggcgggaggatggattgagcttggagaggttgaggctgcagtgagcagagatcatgccactgcctgggtgacagagtaagaccctatctcaaaaataataataataagactgggctctgtggctcatgcctgtaatcccagcactttgggaggccgaggcgggcggatcatgaggtcaggagatcgagaccatcctggctaacagggtgaaaccctgtctctactaaaaatacgaaaaatgagccaggcgtggtggcgggcacctgtaatcccagctaatcaggagggtgaggcaggagaatggcgtgaacccaggaggcagagcttgcagtgagcagagatcgcaccactgcactccagcctgggcaacagagctagactccgtgtcaaaaaaaaaaaagaaagaaaaaaaaataaggccagtcacggtggttcacacctgtaatcccagcactttgggaggctgaggtgggtggatcacaaggtcgggagttcaaggccagcctggccaacatggtgaaaccccatctttactaaaaatacaaaaattagctgggggcagtggcaggcacctgtaatcccagctactcgggaggctgaggcaggagaactgcttgaacccaggaggcagaggttgcagtgacctgagattgtgccactgcactccagcctgggtgacagagcgagggtccatctcaaaataaataaataaataaataaaaataaaaataaaataggccgggtgtggtggctcacacctgtaatcccagcactgggaggctgaggtgggcgaatcacgaggtcaggagttcgagaccagcctgaccaacatggtgaaaccctgtctctactgaaaatacaaaaattagccaggcgtggttgtgggcacctgtaatcccagctactagggaggctgaggcaggagaatcacttgaacccaggaggcggaggttgcagtgagccaaagttgcgccactgcactccagcctgggtgacagagtgagactccgtctcaaaaaaaaaaaaaaaaataataataataataataaaataataaaaatgacagcgggaccaaatgcaaagaaacttgggtcctgatatcctcaagctgctaaattcaccaaccctggaatccccctgcttccagccttcttggttacaggatacctttccttattgtttatccattttgaatcagggttcctgttccttgcagctgaaagcattctcactgatacacgtgaggcccagtgttgctttattgatctattcgaccttcattttttgttaacgtatcaccttctagaattctcgtcacaagcgcgatctcatcgaggcttgctcacacccacgaggttatgctccctggcagggcaacagaatccagcactaagacagcagaatttgtagcaggcaaactcgggtttaagtcccagctctgccactttttaaccgtgtgaccctaatcgcatatctctctgtgccttcatgtcctcacctgcaaacggataacaggccccacagcaccagatgcacatgacgagatgatgccaacagggtgtaagacccggcgcccaacaccctcagtacacatgcaacaaatggtagccattatagcgattgtcattttaacctttcagatttgctttggctgtttccacctggattgggcctgattggtggcaaactcattcgctcattcactcaacaaatatttactgagtgcctacgtatgccaagcactattctaggtgctgtggggatgcagctgtgacaacacagatttactttaaggtataaagttgtaaacttggtacctaacaggtatgctatctgtctttcacttgcctctccataccccggaaccaattatgggggggctcacgtatgttgcccaggctggtctcgaactcctggcctcgagtgatcctcctgtcttagcctcccaaagtggggattacaggcgtgagccactgcccctggcctcccagaactaatttctgccgtgctctgtaccctgagaggctgatcctggtcactcctttgctgactggactctggttgggtttggccagtggggtctgtggcagggtgagagagaggtaggtggggtgaagttccttccctgctctctccctcctgggagctgtgtcacaggcagcagctgtgccctccacagcacagctctgctgctcccgccctccgggactcgctaaacacctgccccactgcccttcccccagggagtcacagcctcctgctctgagatgtccatgggtacctcggcatcccttgttttctccctcaatcctctggtgtcgtcctttcattaaagtctcttcatctggggccggacgcaatggctcccagcactttgggaggctgaggcaggcggatcacttgaggtcaggagttcaagaccagcctggtcaacatggtgaaaccccacctctactgaaaatacaaaaattagccgggcgtgttgacacacacctgtaatcccagctactcaggaggctgaagcaggagaatcgcttgaacccgggaggcagaggttgccgtgagccgagatcacgccactggactccaacctgagcaacagagcgagactccatctcaaaaaaaaaaaaaaaaaaaaaaagtatcttcatttcagccatctgagaagataagcagttgttcagcaaatttcttagccctaatagaagagggggtgtccatagcttcaggtctacacaaagccttgatccttgcacgcctgggaacctggctcccgtccctccctgggatcttaagcacaacattcacgggcttctcctcagtcacttcctctgactactctgtggggtcaggcactgctgcaaggcacctccatcttagaactttcttactcccaatttctgtgtccctgatcccagcacttctagtcccctccatctcaacattatcaaagacagcttggactcactggatgaaggagaggccttgggcaccgcccccccaatccccacccccgccggccaccgtagagctcactgtggtgttccaagctctctcctgtacctggcattatgtgagctcaggaccaggctggatacttctgtccccattgtacagacgaagaaagggcctgagaagacagagggctttgaccaaggccacaggctgagctagtgtggatcgtgtcccaccagtgacccgcatggctggagcacaccgagggtgtgggtgcaggggcagggtgagctgaggctgctgtgaagggccctgggccgcacatgaaggatttgggttgatcatctgccaggggccggggcagggattttaagctggcaggggtgtgtgtgtgtgtgtgtgtgtgtgtgtgtgtgacacacacagagacaatcaaatctgcattttacaaagttccctccccacccccaggtcttgggaaatcagttagaggtgacagaagtcacaaggagatcttagaagaccgtgcatgttggtagtgagacatcgatggttttcccctgcttctctatactttactgttgaaaatttccacagggaggctggtggcggtggctcacacctgtaatcccagcagtttggaaggctgaggcgggtggatcacgaggtcaggagttcaagaccagtctggccaatatggtgaaaccccatctctactaaaaatgcaaaaatttagccaggcttggtggtgggcgcctgtaatcccagctactcgggaggctgagacaggagaatcccttgaacccaggaggcagaggttgcagtgagctgggatcgcaccattgcactccagcccgggtgacagtgtgagaccctgcctcaaaaaaataaaataaaataaaataaaataaaataaaataaaatttccactgtaaacatttattactttacaagaaagaagccatgtttataagaaaggctactggagcactggaagtgagacaggggcacggaggggcttgggaaggctgggggtgggcgacccttcctgagggagacagcagctggggcagcctcgtaccggctggggcagcgtggtcgggggagcattatgtctggacacacgcattcgaggagcctggggatgcccggggaagcgtgtgtgggtgactggagctcagaatggagacctgggtgggggcagggactaagcagtgcacctggtgcctgaggagaggaaggcatggtgtgaggagaagaggctgaggagtggggcacaggaagggaagaggcaggcaaaggagagtcgcccaggcagggtgcaatggctcacgcctgtaatcccagcactttgggaggctgaggtgggaggatcacctgagctcaggagtttgagaccagcctggccaacatggtgaaaccccgtctctactaaaaatacaaaaattagccagtgtggtaattagcctgtagtctcagctgctcgggaggctgaggcacgagaatcacttgaacccaggaggcggaggctgcagtgagctgagatcacaccactggactccagcctgggagacagagcaagactccgtctcaaaaaatagagggagtcacccagaaaggagcccagaggctccaggtggaggctggggagaggatgctgaggaacagagggtctgcacagccctatgcaggtgtggggggggtctacaaggccacatgctgcagagcagtgggggaggggggtgaaaagagcccatctcgatgtcactggagacccaggcaaccccggagatggggtggaggctgggccataaaggcatgaggctgacaccacagcggaggagctgggctctggggagggagggactagggtgggaaacagtgcaacatcattagagctgagggaaggggctgctggagaggctgaagcactttgtggtggggagggaggcagtctggacttgtgtcctgccccccacttgctagccgtgtggccttggattaagcctcagtttccgcccccgtcacatgggggtaatagaccttcctcagtgtggtgagtgtgagatgagataatgcgcatgcctggccccagcgaaagctctgtcagtgtcagctgctctgctgggcacccaggagggtccagcccggacaggacaaggggaactcatccctggcagtggcaggaaaaagatctggaggtggggctcgcagggtgtctgggggccatgaggaggcaggtgggagctgtggagaggctgcggggggctggagggctgctttttgagaaattctcctgggagccagtagggaggcagggccttgggtgcccagggctgtcccagggccagtgcagggaagggttccaagattcctaggtcccgatcctggctgtgatgccaccttgctgtgcacctttgggaagcccctctcctcctctgagctgccccctcatctgaaaaagagatggactcacccatctctaacctcttgcctctgagtctagaaccttctctaacgtcttgcctctgagtctagaaccttctttaagtgagagcatctggacatatcacagcccccaccctcacacccagaatgggcctgtcatacaggagctgctcataaatattaactaaatcaaacgagtgcactaagggtctctcacaacatctgggtccaggagccaccctgcagcctctgaccaggccacaagggcagtaaacacccacaggtgaggtatgtccactctccacacagcctccgcgcctgctcattagacctgaaagagattgcggcatccctgcaattcctgctgcacccctacccttcctgagggccaaagtgcctcgccctgtccccacccaaccttgcaaagacgggaggtgaccccactgaaacccaaacacaaggctgaaaagcagatgcaaagttggcttctcccttggctaggggtggcctaagagctaagagggagaccaggatgagagtggggccctgaatagcaggcggagccctgggaagagggagagggaagcggagagagaaacagagtggcaggaagcagagggccacaaaatcccccttctgcaccccagggtaggccaggcctgagaagggacccaggcgttggggctgctggagtcacaaactcgctcgctcgcccctcctccaggagccagcagtggcagctggagagtcttctctgtgtctgagtgagggaactcctgagaggggaggtgcctggttgagaactcatgtgctaatctagatccaaagctccgggatcgggaggaggagggagaagacggttcagggggtgggtggggcagtcctggcagggaaggtctgtctgggaagaggttgggaaagctggtcacgggagcaggggcaggagatgcccagtggggcaggggcccggcatgcagcagagtgggcctgggtggcccccacagtccccgccctcacctgctgctgggcctggatccgcatgtactcggccctctgcttgccatgtttgcttttgtcggggctgcccgcctggccctgggccgccttcagccgagaggcccccggagtcaccaccttcatgggtggtacactgcctccgccactctgcaggaagaggaacagggttgcagttgcagagtccacatggggtgaatcacacaggaaccctagcactgggtggggtctcggggctgggacctcctcagtggggccctttgagacctggagacccctctctagctccacacccgagtccagaacccaggtccaccctctcagtccccacttatggtctccctgcaggagaggggtggggcccaagccagtttcccaacggctcttgagggagagctcttcggtggcttccttgagtagctcaggggcagctgatgccctccttggggagcctctgctaaagtgagggtccccagcagcaaccccactcccggcaaggggcaccatctggacctgggtgcacatgccagcaaggggctctctataatggcacacagagcagaggggcagccccaggcccacatcctcctcctaaggggaggatgcaggtgaggtctccctagggatgggcaagcttggctcccatgaacctccccaagtaccaggcctgcccgcggggcactggggatccagaggcgcaagcagagagatgacagagacagagaatcagagacaggaaggggaggggagcatggggatggaaggtggggagagaactttatttgttggtttacagatacagagcagaagcgggaggccctggttcttgccaaggctggggattggccggcccctgggtaggccggcttcccagcctcccccggactctgcctgcaaaccctgctctggcaccaggctcccaggagagtggtaagagctgagagaaggccggtgggaggagggggctggcctggcatttctgctgccccctactctgtctgactctggaaatggaggaggaaggcagcagaggaggatgaaaagcgggcagccacctgggggcggaggggtaggggtggggggctgccaggggaccccatggcagggcctgtgcccatgttgctcagggtggcttccagctcccggagcgtctcctccaagctgtccatctgctgggcagtggcgccccacgtggtgcggcctgagttggcagcagcctggccctgatgctccctactgcaggtttgggcatcatgtccagagtccttgaggatctcctctgggtaggtgtcagcagtagaggtctctggagtcccatcctgggctggtccctgaggacactgtactctggctcctccatcctctaggctgctgcctcctccacccagtctcttcagagctgccccctccttccggggcatgaagctgctcctcggcccagaagtctcccccactacccctggtggggactgtgggccatcccagcccctcgtgctgtcagccagggtctgaggtcttggggtgggagctgtcctgggtcccagttcctcaagtctggcctctggcggggagggagggttgggggcacactctgtcaagatgatccttgggacgcagaaggccctgggacctggggcagcctgccgggagaaggaagatgaggaagagtgtgattcctacaaccaaaccccaagctaaaatgggtgttacagttaggtgagcctagcccatttcttttacagatgggaaaactgaggcagggagggtcctgacagaggctacccagtaagttggaggcaaaattgggaccagaattcaggtctttcccaccataccctgtggcctcctacttgccagtaaaggtgccggtttggccagggcaggcacacatttactttacaccacccatgtgagcctctgggagccgggctcagggttgttcccatgagcgtgcccatctgtgcaatgactcgacaccaaggtggggccggtggaggatgaagtgagctcgctgggcatgttgtgagtgcttcataaatattagctatttgttgaaatgaatggaatggccgagacctttggccccatgtgggcagagacaacatgtcagcctctggcatctcaaaccagagacttctggtctaccccaactttgtgtgctctccccaagagcttcacagctagaaggggtggggcttgccccctgacaaatcctctgtggcacacacactcgggcaaagctcccttgggcacctgctccggtgccagcatccctggccctggcctcggtgagggcacagagggaagccccaagtaccactccccgatgtgagtgaatcctggtctaactctgagcaccaggcttgtgccaggtgccgtcacacccttcctcaccttcagtgcctaccttaacccgggaagtgactgctgctctcaccagggcgagggaggtaacacacttcacccaaggccacccacccacagctagttagtggcagagcctggatttgaacccaggtagtctgactccaaggccagtgctccttccactaaagggagccgtggggagatgggagggggcagcagggacccccaaccaccccctcccaaaggaacccacccagccttgccacctgcttacctggaagtggggggtgctgactgggaaggcagagagggcaacctcacgctcgcccggctccgttgcccgatgctgccgcaggatgcagagggtcggccaggggcaaaaggccttgtccactgggcccctcaggatgggctcccagagccggaaaggggcagggcttggatgggaggggccaaagtgccaagggcatggccagcccaggaggcgccccttccatacagctcatcctagaggttcctcgcactgctctgtgcccatcctctgcccagcagaaggcactgtccactatctgatgcccctctgctcctcccccgccaggaaaccaaagcgccaacaggcctccagccaggccagaaatcaggtggccaccagcacagagcccactgtgggccagggagccccagatagggagtgtgtgcacacgggaggctctccttctccagagcggaggcccccctgcctcaacctgacctggcagagagagagagattcccagaccttccccctcccctcctccccaagcacagtccccaggggtagggtgcagacagcaggttcacccccaaattcccaggaaagaataaagaggaaataagtgcagcaggacagcagcaaggactgacattagagagaaggaagaatttcccaatgccaaaagaaccagcagccaaggaatggcatagctttcttccattccaggctctctgtccaagagggcatcgtaggcccttgggctagtgaggctgtagacgagcctacccctgtggtgtcctggcccccagcgcaaggcatagattctaggggaaaaacagagcccctccccggcacaggcagcagagcagcgaagatggaggtgggggctaggcaagggctcaggacaaggtcagattttgagctggatccaaagtcatcttgtgagcaagatccaaactccaatcttggccacactcagccttcgggccagacctaagctcaaactgcgaaccagaacaaaatactcaggcctccatcagcaagcccgtgagaaaatgcagacacaaggggccaccagacacccaggctgctggagtctcagggagccccccagcaagcagcggggaggaagggttatgcgcctgtccttggagtgggggaggggtgagtccacatgtaatgctgtggcagtggctgtggccatggtgggacttgggatggtgactggcgttttagcgggttagcgtgggaggtgaggagaggaagctgtgggggcacaggcagagagagagctgtgagaagtggcagcagccccgttaccttccgtgtagggcctggggctgagcccccggggggccccaggtcctggggggacagcaaggtggggatcagctggcggcggggcgtgggggggagggaagacactgagcttctctcaaacacctggggagcagaaggtgggggcaggtttggaggagggggcactagggaggatgggggtgctggcctgtggccccggcacccttggggagggtggcctgggatggcatcggcccccagcctcaccccttggtcccttgccatagccgccagccctctctgccctcatctggtcacctcagagccctggtagtccaggtctcccgcactggagctgggggtggctgagaacgcttgagtgtggtgactgacactgctgggagagtcgaggcatggggtatgagagtctcagagctccgtcctcagaatactcaagtatgggggtctcaagcatgagctgatctcagaacactgggggatggggatctccaaactcggtgatctcagaatcttcggatacgggactttcagagtgcaggaggtctggggatacttggggggactcagagactatagttaaaaaactcaaacctgcaaggagagaagactttagacccccacccctcatttcacagtggagaagaaatggaggcaaaaggctggggtctgaacagccagcgctccgcagggagcccgagagcccatcttctgcctcatcctgtcacctggcctggggggcagcctgggagggaagggggcctggctgagaccttgggggccaggtgtgccctgacctacctctagctctgcgatgatgcgatcctcgtcatcctcgtccttgatggccgaggccatgatgggtggtgtggaggctgggcgggccacctcagacacagcccggcgcagcttcacctggggcttctgcacctccagctcctcggactcagccttctgcaaggcccgggactcctgtcaaggccaggctctgccccacttcagcaccagctcacctcccaggccccatcgcccatgtaccccagcttctcgtctgctacttctgctgctacacccctgccagggtgtccctcaacagacaggggcctggcatggaattaaggcaaatacacatacctagaatcccaaactagcaggacaaagtcgccaccggccactccctctttccttccatgttctctgagaaaggggtctctttcccaccccagagggcctccagaagtcatctgaggcttcatcctaactcagtcccctggccctctgtctgaggtgggagtggtaccttgatgaaggccgagtccttcttgctggtgaccaccacctctccggtacgtgtggtggtcaggccatgggaggaggggaagctccggcggggagggggcggtgggggcgacttggagggcttctctgtgcggtatcggggcacggtcaactcatctgcaggcaccaaggggctgggggtcagcaggcctgcaaccttggagtcagtgcactacatctaacttgaaggggataaaccttgcttcttcctccagggaggaccaggaggaggtgagaggaaagcctgggggcaagaacacagggcccctccttctcttacctctcctgcacacaagccccaagccctgtccctctcctgacagcactcttgctactccaagtgttgtctgtggaccagcagcactggcagcgcctggcagcttgtcagaactgcagctcaggccccacctctgggctgctaaaccaggatctggttgaacagatcctgaggtgacggacacacattcaagttagagaggcgctgctctaaccacctccttcccactgcccctcacccttgcctcggctcagctctccatctctcctccagggatcctggcccctcccactgggctctcctctcccccaatttgtcctccagccctgcttccggggtaacctgcagagaggtcactctagccattcccctgcctttgatcttgcagtggctccccatcaccccaaaccatgtccaagctccttaggccagcacctctgcacctgccaagctttcagcctcagctctgcttgctgctccccaggctggaccctgttcaggccatgccacacacacaccttcaggcgtttgcacacgctgttccctcaccctggagtacccgctctcactagctagggaagtgcccactcatttgcaagatttcagtgaaaagtcacatctttagggaagccttcctgccctcctagggcctccgccaggactgcacagtaccggcattcacctctgctattacatttagcacttgcattctatttctggtttacatactaggcatggtccggcacagatttcttaatcattttgagcctatgtccttctctgtaaaatgggaataactaccgtgtctgcctcctgagcttgttatacaattataaggatgaggccaggcgtggtggctcaagtctgtaatcccagcactttgggaggccaaggtgggcggatcacgaggtcaggagatcgagaccatcctggctaacacggtgagaccccatctctactaaaaatacaaaaaaattagccgggcgtggtgcaggcgcctgtagtcccagctactcgggaggctgaggcaggagaatggcgagaacccaggaggcggagcttgtagtgagccaagatagcgccactgcactccagcctgggcgacagagacagaccccgtctcaaaaacaataaataaataaaaaataaaaataaaattataaggatgactacattaaaagcaatggaacagttcttatcacagagtaagtgcttgataaacacaaatgtcagtgttattccccccactaaattttgagctcttttaaagcaagccctgtcttatttccgtatctccagcacctagcacacagtaggtacttaaccaatatgcattgcaggaatgaataaaatgaaggaatgatgactgccacttctggtctggatttctgccactcccgggaccgtgactcaggctggggaccatgggaactgtgtcagtatcagcagtatcagcgctcaacccgccctcaacacagcctggtttggggcatgcgcccagccaagccgtggaggcggatgactctgcctggacttgctccctgcctggtcctctcagtggctcccttcccaggacagtgggaaatgccgggatggagtccagcttgccctgtccttctgggtcccagtctccctttagtggcagccgatgtcccagggcctcccttgtgtggcagcccaaccacaatgatcttgagatcccagtgcctcccccatcagcctgggctcctgaggagggcactcccccacgctgggctccttaccagccctactactccccatacctgagcccctcctcccactgggctccgttcggggggctgccttctggccgtggggggccttggggggcttgtgatctggagtgggggccgggcctggatgggccttgctggcacagtccaggtcagggatggccttgagcagctctgcctgtgtctcttccagcagccggttgatgtccttggcactgtactgggtcagggctgcccgcttctcctcccagtctcgctctgcagccttaacagggagccaggagtcaggattgaggtagctctcctgctccaggacctctggggcctcagcctcctcccccaagccacgtaggcaaggaatagaaaacgaagcctcatatttgatcccacctccaggaagacactttgacttctcgtgggtatcacatggcatccccatgggtaggaatgccaccctcattatatactacattcgtgataaacttagatctatttctgggcattctattgtttcactgactacatagtctattcttgggcaaacatcatactgctttgattattgtagctttataatacgctttctgtctaggagggctaatgtcaccctcattatgcttcttaggcttccattagggcactggccctcctcccccaaggaaaaagacccacaggattggcactccccactctaggaaggatggtcgtaagaatgtgtgaacctggctcatggccccacccacaatccctggccccagcacctcaacagacacagctttgtccacgcttctcttgccaggagtgtccaggcctttggtggggttgccccccttgggggtaagagaggctccttcagctggcccgctcagctcatgcaggttcagcggggggctggggggtggcatttcgaagtccacgctcttgttgaagtcagtctctgccgtcaccttcttgggggactgactcaggagattgttggggggtggccacacaccctcatccacttgcctggggttgggagagttgggagcagctgtgaggccagcaggtggtgacccttctgcaggaaggctgctctgagggaggtggggtgggaggcaggctctgggatgctgtgggagggcctggggaggagtgactgcccctggtataagaggaagccaggtctacagcatgcaggggtcacagggcagagctgaggtgccagtccagtcggcacgccagtgacctttgggggagttggggtaagggttcagtatgacctatgggtctgggcccggtgtgtgaacccatgggaaatcagaggtcagggacagaatgaccttcggatctgggccagcgtgtccgtgaccccgcggcagcgcttgaggagcccatccaggcgctggggctcctccttcaggaacttcaccgcctccacctccacgcgcagcaccacccgcatcttgctctgcaggcccgggaagtgagctgaggagacaggaaggcatgagctggggccagagggagcaccacagactgggaggagaggatggtggctggagtatggcagacttccccaccctgaacaacgtgctgcattcgcaggccccagacccacccttgagctctgtcagcgtctccccgagctgcttcagcaccagtgccttctcctccagctcagggccgggcaccagccggtggttgtgggacacgtctctctggatcttctccaccgatttctccaggtcactgcagccacagagagaccctttcagcccttttggcctgagatgccagcccagccccctgaaattgggcaactggaaagaaatcaggccaccagttggatcgaaagtaaaagcaggaggctgggcaccgtggctcacgcccgtaatctcagtactttgggaggctgaggcaggcggatcacttgagcccaggagttcaagaccatcctgggcaacatagggagacctcatcactacaaaaaaataaaataattagctggatgtagtggcaggtgcctgtagtcccagctactcgggaggctaaggcagggggaatcacttgagcccaggaggttgaggctgcagtgagccgtgattgtgccactgcactctagcctgagtgacagagggagaccttgtctcaaaagcatacaaacataaaagccagccatcaggccacatactcaagtaaaatctgcaacgccaaatctcagagatgaggagacttcagaagcgctccctaagaggtgccctgcaccatctgcccccttggaagctctgaccctcagcaatatctgcccgagtatctctcattgtaacttgcatcccctgattctattctgccaaggaagcagagagaacttagttgcctttcaaagaaccagaggcagagcacgtgcccccggggaggtctcttgtctcgggggaaactgccatgtccattgcccttctctcacatgatccagccacacagcctctttcctgagggccaaagctgagttagattttcagctactatatgctgaacttgtgtcatttgagaccctacattcttctaaattgtaaatcagatcaggtcttcacttgtgccattgaacgctaaatggatcccatcatcctgaggcctaacatccaaacttttcaatgcagccaagaagggcaggaaggtggtagttgaaaacttggttctagagtcagactgatccaagctccaatcctcactctgcccttgccagaggagagatcttgggcaagttacctaatatctctggacttcaacctcctcgtccaaaaaatagggatggtaagagctccccgctaggcatggtggttcaagcctataacctcagcactttgggaggccgaggtgggctgatcacctgaggtcaggggttcgagaccaactggccaatatggcgaaaccctgtctttactaaatatacaaaaatttgctggccatggtggcgtgcggctgtaatcccagctacttgggaggctgaggcaggagaatcgcttgaacccaggaggcggaggttgcagtgggccgagatcatgccactgcactccagcctggggaacagagtgggactctgtctcaaaaaaaaaaaaaagagttcccccttcatgggggccatcaggtggattggatgagctaatgaagacaggaaagcacgcggcaaagggctcagtgcctgggaactgctcttgttttccgtgctgctgtaaccctcatctcatctggcttctgcttagagcccttcagacctgctctgaggtgctacatgtgctgtcctctctggctctttataatgctgttttctctgcctagaatattccattcacccatacacatacaggcacacacacgtgctaactcccactgatcctcaggtctcagtgggaagctgtcctccagcccctccccttgcggctgttgggtctgcttcctgccctccaaaccgctgaagctcctgttggctgggttgtgcagccttctggactactaaccccaggcaggcaaagaccatgtcttccagattcatctccggtttctagcacctggcatggtgcctggtgcagagtagatgtctgggaaataattgtggaatgaatgaacaagggagagaaggaactgctgcccaggtaagtcatctcagttctgtacttgagtcgctgacatccctgactcacatgcgggactttatatatattcctgtcaaatcccattgttggatttcagctcaatccaggggcaaacaacttttgaatttcagttctaccatccaacagatttgctcccccttaaagctctgtgtcatcagcaaatcttatcagcacgccttacacatcttcatccaactagcaggtgaaaagacagactgggttgaagtcaagggcaaaagcttgtgactcagcaacactaccagttaaagagctatcctgtattacgcacttactgtatgccaggtgccacactcaggccttggctttcattactttaattaaccctcaaaacaaatcctggaggtgggaacagttattatctccagcttatacacagacaaacagtggctcagagcctagactacacatcccagcctcccttgcaatgataagtggccatttaactgaagtctacccaatggaagatgagtggaagggatacatgctgcttccagacctggctcacaaaaacctcccatgtaaggtcctccatgctcctttctccttttccattggttggaaactctctgggtgatcttggaaaacacatgttgaagacggcagaacctccatcagcctgggtccctgaatgactgcatggagaagagccacccgcctaacccacccaatactgttccatgagaaagatatgtttattacttttgaattattaaacaatttgggagcttatttgttataggaagctaccctaattaattagctatcctaagactctggcattttaaaaaaaggaaaaaaagatattcagatattcaaagagattaactagttagttcaaggtcatacagctattttgcagcaaagcgggatctactcacatctgacatcagccattggttctgctgcatctcattttcacactagaccaacatcagccacgctgcccccaatccatacactgtcctagcccagccctcgctctaccacatgggaaagaacaattcccctgctcatatgtgtaacacctgactggtccaggctgtgccagttttataaaatggtcactcccaaacatcactcagagggggaagagactctcatgtaaaggactcaaataagcttccaggagatgacaacactgcaattcttaggcaggagagactaggcctccctaagctcaatcggcaacttgatgttctgatcacccaatctgccaaagttggggggcctctaacctgggcaagctctgcaaatgagtcccaggccagctagtctagacactggattaaaatgtggctaggctttccaagcccaggtttagtcctggaggggtcaagaggggagagtcaaaatggaaccagctaaataatttatggggcccaatgcaaaatgaaaatgttacctctagtttaaaaattattaagaatttcaagatggcaacagcagagcattacaccaagcatggggcccttccaagcatggggctccgcgtgaccgcacacgtggcatacctacaaagctggacctgggttaggcaaaggtagattccaggacctaaaaggtctcagtcagcagaggctgcacctaaaggcagtgcccagacagaccttaagtgctgggctagatgggcaggtgagtgagtcaagttgaatgaaacagaaccagttttaacttccagcaagttgccaggaaagaggaagtggtatagcaaattggagcaagagtaagcgtaagctcctggagtaaccacgagctacagccagagtgtggggcaggggggctgcagggttaaagcctgggaaggctatgggagctgggcagggagggccttcatggccaggttggagcccagtatctgcccaacccagaagaagcaggagtcccctttcaggaggatggagaatcctgccagaaacagtaatgcaggtcccaagctctctgagtaatgggtttgataatggggcaggggttggggagtctgtgttcctggagaaccaaggccttcagggagccaaggaccaaacacttataatgacggtagcataaatctctcctttcgtatcttctggctctgtgcttttagatctcctttaattttcctttaatgtctcggtaaagttgcttttgaaaattccaacccccctcctctgggctgaatgaaaagggacaaggaaaggatagaaaatctggagaaatggaattccctgggtgaggagagatgacacctgccagtctgcttggagatctggctggagtcctcactaagttatcacacctagagtgatggggtggccccttaccctatttcagccacatggtgtcatgggaattgttgccttgggccttgctaaaatgcacatgtaccaccaggctatgtgggcctcaggctgaggagcagcaacccatctcaaggagcccgtcgcaagaggctcatttatgacttagtgaggaagctgggctccaaggagcagcctctcctggctcccggagtcactggccagtacaactcaaccccttgttgaaaagagaggtgaaaaacttaatgctgggtacagatgaggacactggggcacagagaggggcaggaactgccctgatcactcagcctctcagtgctggcactggactccaggtcccctagtgccctgtgtcaccaagagagggcccaaaggaaggagcagggcctctgtctcagatccttatcactggcgagggaaagcagggtgggtgctcactccctgaatggacactgaaaggcagcgtctcccttcaaaggtgccagacaatggaatggttggccagacagccatttgctaaatttggatcagaagactgtcttctgttaacccctccatgcctaagcatgcggaggcacagtgttcgcgattcctccttccttctgaaaacactacagccctgttccagctgcactaggaaggaaggtgggttttccttggctatatctggattcagagatcagggaatcggatctccaatgatggctggtcagcgccaggctggagcagtgacggcacctgaacgctgcacctgaactcactacccaagggtcactttgcacgggtcacaggccaaaatgaaagtaggcagagggcagagggaaatcaggcagctggccacatgacagtgaagctgcaggccacaggaagcctgagtgtggatcattatgaagcaagaccatagcaaaagcaggcatcaagccagaaaaaagaaatcaggaataatgccagccggtcaaaagtttgtgggtcacagtgaaatcaggccagaggagaatgaaatcaggcttcagaacagaccaacgccacctgtgactcagagggaagggagctgcgcctcccagggaaaccaggttgcgggtcactccagccgcacccccacccctccctccgccgcgggcccagcctcacttgagctgctgggtaataagctcctcgtcgttgagatagcgcagccgttcctcttccaccagggtgcgctgccgctgcagcgggtcctcctgccgccgcgccgcctccgacacgcgcatgctcagctctgcctccgtgcgcttcagcagcgcgcgcaccgactcctggttctgtagctgcgggacgcacggacggatggacccgggtggggggagcggagccgcgaggcaggggaagggccgggagaaggcgggtagaggactgcccaatccagggcggggctctgcagaagaagcggctgcttggctccgcctcaggcagcagcgaaggggtgggatggcgaagggcaggggcgggatggcgaagggcaggggcagagggctaagttctggggaagaacagaggcaggaggagaacggatggggatcgtggagaggggagcgttaaaatgggccatgcaaagggggagctgcatggctgtggccgcgagcaggggtggtattgcagggggaggagggcaaggttaagttctggggaatatgaggcaggagaaggggttgggaatatttgcgggacagggtgtagccctatgtaggtccctgccgacagtgcggccgcatggctatggcttccatcatcccggaatggggacgggactggaatgaaggactcaagcgctggcatttgatagagcttctatggctgggacaggaagactaagttgatgatcgatccaaccctgttccaagcctgaatggcgggggtgggcaagatcttacccgttgcccagatggcaattctctgccccctccccagcctgtctctgctaattatcctcacctgacggcccctgggcctgcttgaggagcggactcggcgatgccaagctcctgacaggtgggaccatctgccaagcagggccggggagactgttggggctcaggagggaggagctgagaggacttgggggaagggctctcgctgactcagggaaagggatgcagggcaggaaggaactggaactgccccgagggatactgacgacggaggggctcagtgggtgactggggctccaggagggcgatggggactcagggaaggagaaggagggctcaatgagggggtcacgggcgagggataaggccttggtgaggaagtggaggttcagcgagggagcggaagctcaagaaaggggaaggggagaaagggttcggagagaggccagtgagcggcgaaggactcgggcgtggaagctctgggaaaaggatgaggtagtaggggatggggcgggacttgcggcaagggacttctaccagtaggtgggcgttggtggggcggggcccaggacggggcggtacctggagcttgcgcaactgctggagctggccgcgcaagtcactggcgctgttctgcaggcctcgcaggtgaagctgcatctgcagccggctaacggcggtaggctgacctgcgggggtgctgctggccgagggcgggggcgggccggacaccggggtggccccgctgctccggccgcctgacccacaggctgcagaggaccacgaggatgggagaaagtgaacaaactgtgagcctgggaaggactgggctgggacaaagtcctccctactctccgaccccacacagtagccagagaagcccgtggctctacctgccccaagtggtcagccctaacggtggggaccaaagtgccaggaaaaagacctcttgggctaaggccagtgatgtagctattgcttaatccccactttatagattagaaaacaggctcggagagaacaaggatgggggagggggaggttcactcacgtgctgagggggtggctgctccattggagccttcaatcttctcgctgtggcacagggaaaaaagccatcagggggtccaggccagccccagaccttcagagctgggtggaaccttggatgtcatctcctccagctctccgatctcaggatggagtcccagagaagggaagggattcacccagggtcacccagtgagacactggcagagccgatgcccatttccccttcctcctgctccacccctaggccctggcagtggtgttgggagaggggcctcacctgggggtctcaggctcagagcctcgcagtaaggcgctctgcaccaggcctgtgaggctggcaatctgcttctccatggcctccatgcgctccctggggaggaagggggtctgggcaacctcgcctctgagcatagggtctctcctgcccagccccccattcctaagattggtaaccagaagaaacaccgtcccatccctggctgccaaaacacagacaacgcaaagggccccaatgcctaaggatcaagcccacagcctcccatctcacctttcattccctccctaaaggctgcacgctgatctctccatgcctggcaatgctttcccctgcctgctctgcctttctcctgacccctcccccaaaccattccacagaccccaggggccccgaggaacgcctccttccataccacccaagggaagtggaggtatgctgagtgtctccccactagaccaggacaggaactgggtttgctcagcttggcattgacagtaccctgtgcagcgcctgccacacaggccacgtaagagctgtgtgaaggccaatggcttctcttcactgctcagcagcgctgcctgagggtgcagattacctactgccctggttacctcctccagccctgcacccttaggaggggactgagcgatgggcaggggctcctcagcctggaggctaggtacccgaatgtgctcctttcctcgtcaccatttttcaacagcaccctcctccccagtggacttcagctgtcccggtgctggacagctctcactgctgcaaactcttaagctggaaagccactaaaagtggttcagcccctcaattttacagttggggaaaccgaggcttagaaaatggatgcaaacccaagtctccagagtcctcgtctggggacctctcaaccaccccctccagtcttgcggatgggaggaaaatggcaagctggtctctccaatgccctctctgccacatccaagatgctctctggcgacccttcaagactactcaaggtctccaaaggactccaggatctcagtccaggacacacacctgccacggactctgctgtgaaccctctccgcagcgcaccccccacccccagtccctgaggcctggttaacgtccctcacctggtctccgtgtccttggctggcactggcggcccgaacccaaccagcgagcgttccccaggcccagggaagagctccgaagggggagctccggccgtcgaggcgctccccgcgctgcgggtcttccctccaggactctcggcaaagacggacgaggagcccgagtccttgcggaaggactggcgcactggcgagccgcggctgggcggccccgagtaggggctgtgcggtggcgggggacctccggggggtgctgccacgtcggccagcttctgcggtgacgaaggcggcaggcggaagccgtagccgtcgccgtacagcgggccgccgccgcccgccgccttgtacagggagtcctccagatcggactgcagcgcggcggccgagtaggtgctgagcgagcgcaccgagccgcgcttgtagaggccgccggcgcccgggtaggcgaacgggtcgccggcggccgcggccaggctcagacggccctcgtgcagcagcccgtaggggtcagcatagaggccctcgcctttcaccagcaccatgccgcccgccttgctcgccaggtcctcgtccggcttcacgtcgcgccgctccaggatggcgctggggctggggctgacgccctgggcggccggggcgcctcccagcctctcggccgcgtggtgcaccgggctgccggcgtacgaaggcgggcgccccccggcgtacgataggcgcgaacgcgacggcgaaccggactgcagcccggacggcagccccgacggcagcccgggcggcggcgagccggatgccaggtgcggcgctggtgacaggttgttgaggcgccgcgtgggcgaggactcccgcgatgcgtacaccatctctctctgcgcagaagacagcccggaaccccacggggctggtcaccaaggtcacccctgtcccttgcttgaggagccagcatctcctccctgacgcttaggaagtcccttctgctctctgccctccctccatcctgctgcgtctagggtccctttcccatcagggttcctagcatggaggaaaaggtggccgatgaagaggcaccagaggggtaaccctcagctcagctaccgtgaggggtgggaagtagaaggggaaggggtggctccggctcctgagagagggcttagaatatctggaggcaagttagcaaaatcccgagtggacaggcccggaatggaggggaaagtggcaggtgggacaggggctcttccctaacccctcagcccctatgctgtcttctccaaagctggccctggttccagatgacaactgcccagaccctgctcccctggaccccatgtgcccagcctccccaatgccctgggcatgcccagccatacccggaggtccccgttggtgagatgtgagccagggaaggcagcgtagaggggctcctttctgtagatcttgataatactgcggtcctggatgtccctgggagaggcggggagacgggggtcaccacccatcccccagctgtgcacaatgagaagggatggctactccaggcctagagaagaggggtggccagaggcaccgggagccccatctcaggctgcctgcacacacgcccagcagcctccaccccggcctcttcctggcctccggcgccattttcaggttagctcaaagcaaagggaaccagcaggggtggacgatttagggggtgggggctgagatggccgaggaagggggcggggcggtagggctctgggaggggaggggaaaggctgaggtcgggtcaggaaggagctggggaagggccggcggggtccagcaccctgcagaggaggagcgtggggaagcccacccaaatcccccccggtccacgcccaccggacgtcctccagctcgtagaagacgttgcgagcctcgtctttgatgaggatggcggtattgggcgacttaagcatgcccatggtgagcttctgcgggaacatgtgcgcgatgagtgcgtgcagcgtgtccaggctgctgacctcgtgcgtgatgtgcacgcgccgagtctcctccccgaactgcaggaacagcacccctgcgaaggagacgccgccctcgctgtcactgctgccgtctccacgccgccctccaggagagcgcggggagcttttcggagctgcgccagccccgcagcggcagggtctgaggctagacgccgcccccgagtgcagatgcacccaggcacctctcatgctgccggcgggggcgccaggccggctctccagcctctcaaggcacccactggactccaggcagttgaaggaacttggacaaggaaatggaagtgggggcagagcaggtggggcggaaactgaggggaagtgagctgagggagagagaggttggagagagttagagaagggagatgggagagaagggagggatgaaagaaagggacagaaaaggaagcaagagggagagaggaggcttggagggaaaggggtcgggtggggatgctgagggcgagagagagatggagagagctggggttgcttggggagaaggggctgtgggaaagagagcagagcttgaggcgagctggcgtgctgtaggggaggagggggctccagggagtgaagagcagagggaggagcctgtgtggggagggagggtggactgggcgggcagtacctggggagcgcagcttggtctggctggccgagcgggagagaggcaggctctgtcggaagcggttcatcctgctgaagcccaggggcagctcggcctccgacatggtctccagcgactcggcggaggcgtaggacagctttgccgcctggtctgccagcccgggctgggctccctgagtgtggcgtgagctgcgggtctgcaggggccgggcagggtgagaggaaccaaggatgagcacccccccccccctttgcttgtcactgcccatatccaggcctgggaaggtcctgccagccagcgacacccacacagattacagactcccacacagattacagactcctggcatggccacaagagagttccccagtctctgctggccttggcctccctgggacacccggcaggtaaggaatgggcaaaggacccaggcaccctgggaagccagacaagaggccatgtgagtgggagccatgggcacggctgctatttcaggcttccgaagaacaacacaaatttgtcaccgaggtgagcagcagaatcgttgagcaaattggggcattagttccagacattaattaagtggcaggtttgtgagcggagaatttattcttcatggagttcagagggtgggggtgggggtgggggcgggaagcagggcccagggagaaagcaaagagagctggcaccccaggatcccagctttgaggggatgcggaccctgacagagctggacacagggaatgtgcctgatttagggtgattgagaaaactatcccgaactcctcaaagccagctggacccggatttgagacgacctgcccagtgcccacaacacacatgttaagtctgatgtgacacacatgtgccaggcctcagcccctccttgcaaggcacatgctgccacacagccagccagcctcccccaggagcctctgagtgacggcagccacttctctgaagctgtagctgaggctgatatctggctgggggtgggggaggatgtcacaggacagcttgatggctctctccgtgggggagggggagtcaggatgatttcaaccgtactttaagagcctacttttggctgaaacctggggatgtcactcagggccacagcccctgacattctgccttagtccctgggcaagaaatctggttgttgtacagaagctggtacaaggagtgagataatgaatccgatctacatcattccatgttatgtgcattatatacatatatgtattacatatacatatactgtcaagaaataatcatgttgcccaattatatttttttgtaaaacaaattgtctatttttaacaacaaatcactcaaaaccattaacactggttatctcagggttgacagttttcttttttcactttatagatttctctacaaaacggtgtgaatagattccttttataatttaaaaaaagacaacaataaaatatctctaaaaaggaatcatttattctcctcttcagctccctctctccccaattcctgatttacccctaattaatctccatcttcatattaactcaatttaatgttccaattggattagcactcttaaagggagagcatcttcttctgatgggcagtatgcccagctgtccccaaggtggccttgagggtttggggaccataatagatcagacgtggggacatcagggagcttcccctctcaagcataatgccttgaccactgggtgggtgtgggtcttggcaggaggaaggcagcatagaaatgggccaggggcagtagggaggggccgcttgtgcttgtgaccgagaggctatggctcagctctaggctgaccaccagtgccagcccacacccctctgtctcaccttcatcccagctgaagggcggggagctctgtggcagtgtggggaaccaggtctggtctggtggtcatggggttgcctggcaactaaaaggtcagtggttgccaggctagtgcggatgagggctacagaattcaggcagcacgaggcagccagcaacgatgaagagtagggggtggccatggtgccggggggacaccagtgagatgccagtaaggaggcagaacaggggtccaaatgaagggaggcagggcagggatcctgggggttgctgcctgccaagaaggcagaaaccctgggagaagagatgcccacgttccctgctccaccacttcctagcccagtgggcacctttccattctcacagcctgtacagaaaaccctctcgagaggagggaaaacctgctggcacttctctccatgcttgggctgagacaatagggcagaggaaagtgaaacatccaggacttccccaccataagggagatggcagaagaacaaaacagtgattcaagcagagctctcccaagacaggagagggaccaccatgggaggtagagagcgcctatcaccagagtgttccagggagcagctcatggatctgagattcccagaggttgtccatagactagggaagaatcacttgggagcttttaaaaatacctttccaggaccccatattcactgaaccagaatctctggggattggagcctggggttcgagatttttgacaagttcctaaggcgattctgatttctaggtttgagaatcaaggcagagtctatgatttagtagctaatgaggtcagctaccatgtaaggctcaccaggagccaggcactgcctggaacatgcatcctctcgtgttttgttttgttttgttttgtttcgtttccttccttccttccttccttccttccttccttccttccttccttctttccttccttccttccttctttctttccttctttctctctctctttctctctttctttcttcttttttttctgagatagggcctccctctgtcacccaggctggagcgcagaggtgcaaacatagctcactgcagcctcaatctcccatactcaagtgatcctcccacctcagcctccctccttggccaacaagttctcactacattgcccaggctggtttcaaactcctgggctcaagcattccatatgcctcggcctccgaaagtgctgggattacaggcgtgagccagcacatccggccttttttccctatctttacaacaattctatgatgcagacattgtcgttctactctacagaggagaaaccaaggctaagaggatatgtggcttgccccaggtcaccaagctagttagcagcagactgtatggaattcaccactacgcagcctggctcttgggtccatgcgcttaaccactaccctcaactgcctcctccaaagaggctatgcttgacagtgtgactttgactccatgattctctgattcaaggacttcttgcagtgctaggaagaatgcatgcaaataagacacctggggagtctgggtgggatgcctcccacccgctgtcatgatgcctgggacttgggaggccagagactccaggaggcaagcaggtgcctgagggtgctctcccaggggtcaacaggataccctgggaggggcagacagctgtcttagctctggaaaggccagagctcaggaggaggcaagaaggcacctatccctcagcttagccctccacttagacaacaggcttgagggtgtaggaccatgagtctcctgcctagcacggaccagcccccatggtggacagtaagaaaaggaagggggacccatcacagtcacagggcctccctgggaggtgagatatgaattcaaagaagagggcccacaacaagggtctaagtccctaactcagaggcagcagtctctccaggctggggaaaatgtatgtcatttcaaaatgcccctcaggggctggggatgcctggggactgagcatctctagcccagatccccagcaggggtggcccaaactcctactccatccacaagcccctgacaggcgaacccagactctcccaaagcagcagccacagcctgcagccccgaggcccaccgcccataccagaaggtgtccgtgcagatgcgcaccccggtgcaaagcctgtgcaagggagaggcaggggcaggggagggagagcacatgcagttgtcatgggagcagaggcatcacacactgaccttgaaactccagtagtttggctgctgatggaaataagagaagagatggttatgagggggcccaggaggggaaaagaggggcaggggcaggttagagacccttggaactcagcactcagccctaggacaagggccctccaccctcccaggagcaggaatgaagtcatgcctggtacatccattctctactgagacctggaacaccatggtgtacccaggatggccctgagcaggcgctacagcgactcctcgcagagttactggtgggaaaaggcacagaggatggtgatagagcgaacccatgaggcagtcacaagagaggcagcgacaaagctgagctgtggggtcagagaaatggcaggccagggaacagtgcttggaagaggtggcatttgagttgggtctggaaaaacgagcagctggagactggaaggagaggcctgctgggcagaggggaagtgcccaggggcagacaagtggaggggggttgaggcaagtcactagtccacattggctggggcgcagctgggaaagtagcagattaggctgcaaagggtgggaagtgggaggctgaggccagatgatgagtggtcataactgctgagagaaagtatttagacttaactgggtggacaagcagaaagtgtctgaatggagcagagtgggatcagaactagaccccggggcagaggtggatggggtggatcaggatggatggggcaggggtcggaggaggggggctggggcccaaggccaagagagagaggcctatgcagcatggtggatctagtttacagagcagagtggccaggtgccaggaacctcactcactgggcaatcaatggctggggagctgggggcagtgaagggagttggggagactggggactgtggctggctggctgattgaggagggctcctcgtatccctcttagcatccctagaatgggaagccagagagtcctcctcatttgcagtaacccagggtcacccttccttccctagagaccagaaggcccttccagatggcttagtacaaggaaagagctgccctggggccgggttggttcttggcaaagccaaggcaccctgctgaccggtgccagcctcagcagggagacagaggcagcagatggcctggcccgggggtgcctggcacgagcagacaagatccccaggccttagagccactggcagaggagagggacatcgaaggcgcccctgggggaagaacaccatgccagggtgtcctgggccacctgaatgctttcctggcagggaggagttggaaggggctgagtcgaggggcactccggctggaggctttacctaaggcagacctttggggtgggggtgacactgggctggggctgggaccaagagggtcatttgccaagaccaccccctcctaagccaccatccccatccttcccccagcattcacgctagaaaacaaacaaacaaacaacaacaaccaaaaaaaacagtcacataccaggcagtagaagaggacaacaaagtctgtgtcccagccaatgcttggaatcatctatggactgaggccacccccagtggtgctaggggatgcccacaggtactgagggtaggggagaccagggaccaagtaacaggctccagcggcagctgactgtggcctggggaaggggaggggtagcagagggagtggacacgtgggggcaggcagaggacaccggaaggtttatgaggacaatcacgtctgcagacccagcggtgatggaccgctctgcagagaaggcctcaagtcccttacccaccactaccatgacaccaggcacgggcggcgcacacatgggccacccacagcgccccgcaacacacaggctcacgcacagctgagcacagactctcagacacatcctctgataaggacatctccacagacacacccagagcgacacacacacacccctactaagagaggggctccccagtcagaaacagccctggaaacaaacagaaactcagagacagagacattcacacatagaccgcccccactcatacacaaacgtgtttggctcccgccagacccctgcctcgcttacacacactcacaagcaccatagccagtcacagaggacaagaggtgctgatggcattcacactcaccctcaaaacaccacagtcacagaaacagagacacgggtgcccactcacagtgagagacacacaccccggctattgaaacacacacacacacggcctcagagccacctacgtacaaagagaaagccccaggtcagggtgccactgtcccatgcctatcatgtcccagatatcataagtcagggaggtgacctctgatgcaaaagagatagaagatgttctgtcccccaccctgccaccagtgtcaacacatcagactcaggtaccttgttcggatgactgaggcccacctcgtggtcctgggagggagataaagacagggcctggccacaaccacactggctatggcctccacatgggcctgccccagggtcccaaggctgtgcacatccatggggcagtcacctggaagggacgtatcactagcagcagccaagggagaggactgggtggcatcagtgccataggaaaggccagccaagcccctcaaaggataaagatggaagaggggctgcgcttgtgccggtcacttggatgcatgagagatgttgagatcaaaatctggaacttcaggctctgatctatagagcacatgagtgaatcctgcccctccatcctctgtcctccctctggaaagtgggaagaatgatcctctttcatgttgaccccaccaggaacgagacacagtctcttggccactcagtgtctctggcgaagagaaactgtggtgggggaggcctctggggatatcatccatccccttctctgtctctttccaggattttaacccatgggacagactagcgtgactgagagcaaagggctcctctagtgttctctaaggtgggacattcccagtcactccccttccaacttccagcaccctgtacctcctcacccctttccagggtgtctgttcctcctgctgtgcccagtacagtacctggtggatagcaggcactcagcaagtatgtgacaatgaatgaatgtcaataaaataggaccgagccatgggtggagggtgggatctctgaatactctggtctggcaccactccctccatctcctggcacccagcactgctcagccttctgggccttttccctgggaatttcccaacaccagaaaccccccagttaggagggcagagggcaggaagggccaggagaggtctggctgtccacctcaagccaaatcttccagtgccaaagctgtctccctcccccatagtcagggagggggtctcaccttcccaaaagacagtgaaagggggaaataaagaaaggggtgagtaggggagaccccggcaggggcaaccacttgtggggaagaatcttaaaggagctggggcaaaatgagaggtgttctaagaaggtaagatggaagcataggaccctagggaccacgctgtgagaaacgggggaaaggagtgtctctcaaggcccaaggaagccaggccagggagtcctcaaactcctggtgagaagaggaaacagcttcttctctctgggagctaaggagttaactcccttcctctctcctccatcctagccactggtagaggggttcctacttcccctgctgctggttttccccccctcggccctcatgccctgggaggggaggggctagggcccctggggaggcttggcccagccagctgaggtctctttcctcccctgggcaggcatccccagcaggttcagtgagcaaatgacccctccttgacctcaagccctgaccacgcaccttccaaggagggagggcaacccacgggtccacaccggctccttaatcccctggctgtgctgcaccggtgcacacacccacctctcaactcccatgaacacgagtcagcgtaaacactcgtcccccgggctggggctaagccactcgcccctcctcgggcgcctgcccccaccgcgatgtacatgcatgaccctctcttccagatgtgtggatgacaccctcatctccttcccaatgcagagtgtgtgtgtgggtgggtgggtgggggtgctgtgggacgctggggaagagggcgcaccccgggaaggtcatgactttccgacgctgggggagggggcgccagcctgattttggagtgggggccggcccacgccgaaggcacctaatgcggtgggggaggggaggaggcgtttctcagggatcgggaacctgcaatggcctggacgtcccccacccctggatggctctcggtgccgcggagcgggcccccatctccgtgtccccgccccccgcccaacccgaggcggcgatcccggcccccacagtcgctcccccttacctgcggccacaggtgtacgtgcggggtccccagccccaggtcctgcgtccggctggggagggagggcccctactcccacccgcccgggctcttctctcccccggccgcctccgcagccgcggccgccgccgccggtgccctttgctgcaatgcgagagccgccgcggccgccgccgtgccggcccgggccccagtcgccccggtaaccgcgactccacctggcgcggcgctgcgcgccgccgtgcacatcccctctcgcggccccctccctcggcgcggccccgccggcgcagccccgcagaggagcggcggaggctggtggctgcgtcgccgcggtcacccgatacgccggcctggcgcccgggactcgggttgcagcaggagggagggaggttagacagcctggtggaagccgggggaggggctttggcttggagtccaacctctggtgccctcccaggatcctcttcactgcccccatccctaaaggtcccgcctggtggaggatcagggaggggacagtgttctgcctcctgctcaaacttcagagcccacagcctctccccaccggggtctttgctgtgcacctttggcctttaactctcccgtgacttaatccttagccaagtctgggaggcctaggatgcctaagtttcctagatggcctctcatcctgccctgctgtgtggttctggcctttccaaagtctctggtcctgcacttaacaaaagggaacctcagactcagccttaggggcagggagtgtgataagtatcaagtgatgaaaagatcctatgcacagacactttcctggttaattacagagccccaggaggaaggtctgctcaagcgctcccctttcctccatcagagcagatcccagatgtggacaggccaaaatccccagctcccccaagcccctgacttgggacaactgagctcacccagtccagcctcactcctgtccatcatccaacccctatcacagccccaagatgctccatctggggaggacctctgggcagacaaggcaccacaaccctacccatgcatatcacatcgtcctctgtcctatcaccatccctgtcctagccccactttggtctccgccatgcacttggccattcaggacaagtctgtcccacttgccatccagccttgggggcagacacattcctgttccccaaagttcagccaagatggggcttgggaactgggaaagaaattgggctgaatgccctgtgagtgatgacaagcatgccaatctgttactagacttgagttacactcggctaaaacatcctccctctgaaggcctgtcatttcctaggtggtcacaattttctttctcttaattctccttgaaaaagccaagactttttgtcctctgggggaagcagggtgtgtaaggacctgagcaccctgttcccactggattccctgccactacccctcctccgcctcctacagctgaatatcctcaagtcaagacctcccctgggctgtccccttcccattgcaactctgatgcctattttgggcctcagatgcctatttttctcccatagcaatgtccaggcctagctgggagcccaggcccctggtatcctgcctacatgtgtccctgtctaagctaagatctatcttcccataacggacactgaagcctgatgaggaagaggggaataagttcagaatagatggcttgatgcccaagtcttcttaaaaattagagactaagccatgaacttagcaagaggggtgagagagagacttcatgcagaacttcctgatggtgggacatctggggaaggctggatctgctcagaaacggaaggggagggtgtggagaggggaataagatagtcctcagtgggaggagggcataaaacccacagagcaaggtcaggggacttctgtttaaaggagaaagggatacaaaaacttttttaaaaatcctgagtatcttccctcaaaaaattccttctccaaagtcaaccaggcctgaggaggtagtggcagggaattagacatcgggcagatgtgagtacgggacacagaagtctcctgaaaataggggctcctacaccaaagagaaaaggttgcaaaataaaagtcctgaacatcccccctccaaaaaaaaaaaatcctccccaaagccaaactccaccatgggcttggggggtggggtggaggtgggtgactcacctgggccggctggccagccccggagggggcggagtcgccatggaggtgggagcagagggagctgaggaggcatacggggtccacggtccagccgccaacctgtgtgtgcgaagcgggggacaccccattaggggaagcgggcaggagccgctggggtactgtgattgggagggaagggcattcctggggcaagccttggcacagagctcatactgcagaggggtctagcgatgctggcaagtcccttatttaggctgggtatctctctaactagagccctgctctgtttctggatgtctgcttttctgttagacctgggggttccctgagcccagggcagggccttccctatcagacatttctgaaattctcatctccactttattttttttgagacaggttctcactctgtctcccaggctggagtgcagtggcacgatcatggctcactgcagccttaacctcctgggctcaagtgatccacccacctcagcctcctgagtagcaaggactacaggggcaaaccaccatgcccagctaattaaaaacaaaaattatttttaagagacagccatgttgcttaggctggtctcaaactcctgggctcaaggaatccacctgcttcaaccttccaaagtgctggaattacaggcgtgagccactgcgcccggcctcatatccaattcttggctgtccctctgcacactggcaaggaagctgctccttaccatctccccttccccagctctcatcccctcctcactaaaggtgtcacacctacctcacagaaataggaaccgctgggcaggagaagcctccccccagttgtctctgtcccacagcatacctttctttcctgtatctcagtggaagtgactccacccccttcgttccccaaggccaccccacacctaagaccatccttccagattcctctaggacctgtttcccgtggccttctttccccttggcatcctcagattcattcctccctcattctctcattcattccacaaacactgcctgagctggcaccgtgcttaagcaccgaacattccatggcaagtgaacgggccatagatcctgcccacttacactctaagtggggaaacgaatgagtgaaagaagaaaggaacaaatttgtgggtggctgggctttgattcatttcctaagtatttactgagttccaaactctgtgctggtgaacatgctagaacataggaggcccttagacatgcctatgccttctctcccaggcctgctacccctggaagctccacccagctgttttcatccttttcctggcccaatctccccaaaataagtctgtggctggggctcctgatccttcaccaatcccaaactccctaacccatgaaattggccattactttaccacaccacgagacacaagctctcaataccctctgcgcccacaaatcccggccagtcgcgatgtctgtttctctctccccatcctttggacttctgaagctctggtcaccctcctgctggccccttgtccaggggccttttttcccctgggacttcctcatggatgtagaacattcctggtcccctttccccaaacatcatgggctttctcccttcttagaccccactgtgccctgatggccactccgcatcccaggtccactttgtatctgctgtgaccgtgctcaactcttctcctgaagctgcagcctctctggagtcctgagtggtgcatatggtgccttaagagcatccccaagaatgccctacccactgctcaaacccgtctctgtatattcctctccctcacccccaaacatttccctccaaccctcctatttctctccaaggcaccaacatctccctgtcgcccaggtgtttctgtcattgccttctaggtccaggcagcttagccttagacctacacttggtcttcttccaacccccatccatccatcctttccccttcatcatccctgatacactcttcctcttctccttcccctgcctccagtcccgcttctcccctcctattcaccatccaaaagcaaacacagccaccttagccaccaccatctgccccactttttcagtcagctcccacacatcccactacctcccacctgagccttctcgccggccaggtggacctctgtgccagttcccaaaccaactcaggcctatgcccatgccatacacccccaccactcctaaaacaacattctttcctttagggctatgcaaacccttttcatctttctaagcctgatttagatacctcctcctgcaggaagccttccccgatcaggcctgcctatgatcttccctcctctaaaccccgtcccaactgactgttcccctccccagctagatgacaaatgcccctgcccttctcctcaagccagtgcacacaggaggaacccaatgagaggggctccttgagggtgacggcaacatcttcttcaactctctctaatcctgatctgcatcctgctcccagaaggacttcagagctgggaaaaggcaaaagccagacggaactggaggtggcactagagggcagataaggtagcagaaatgtgccaatgtgtcttgttccctgcagtgaggatgggagtggggacactcctccccatccccagctacatccagtagaacccggaaaagggagacagggactgacacacccccaggcttgactgaaaggctgctgatgggatgtgcatccctcccctcagtcccttcacccaggggtacaatggctgagtctcagaagccaatatgcagcaaccatgcaagcgcctcaccaatgcagaactgtacacaggatgctagacccagaaagcatgttcttacagacaagaagctcatacttgggtggagagatgcattcaggaccccgaggttctgggggaggtttaaaaaggaaccatcccactcgctatagaaggagacgggtcctggtctagacacaggcgctgtgtctcctctctaagccctactgatggcaggagagatacccaggtacagagagaggaggcctccagctccaagtcacccagcacgccacggggtggaacagggaggaaagaggtcaaaggctcccgttctgggctccattcttgcaggctgcaggaactggggacacatcggacccagcctactgaggctctcaaggcccgactctctcttagagtccatatcacagaggtgccgacgaccccagcatctcaacttcaccacaggatggactctcaggcacagaacaacagtccccaaggctgtcctcctctcctttcctcccagaagagttctgcccaaacagcctgagttaaagaggctgggctctctctgccccgtcacacgctctcgatttccggactgcaggcagaggtctgggggccaagcccccacccccttcctccccaggctccagaaaaggccaaccagagccactgccctggagggacaactccccaactcctccccttcttccctctctgctccagatgcctcccagagttggaatgagcctggggacacggagcacggggtcagacctcctcccctgcccgctggccgtggccgcagccggagccgcagccgcagccgggagcccactcacctgctctcgcatcctgtcctgctggcctcgcagggccagggcgtgctgtgggtacttgctcttcaggtggtccatgaaggcatcacgcttgcggtcggcgtccgccttctggagcccgctgagcgcctccagactctgggccgcgatcaccgtgtgccgccgctcggacgtgtgcaccagccccacgttggagaagcgccggcccccgctgcccccgccgcccccgccccccagggtccggtactcccgcgggtactccgcatcgtccgcagacagcatgggggggctgctccgctccggatctgcgagaggtgagaggggcacggctgggtcacggcgcgcccggcctggggctgcccatcccccaagggggtccctgcgggaaggggcggggcctgggcctaaggagagtggagaggcgcccggggagaggcaggggctgcccagcaccccactagggactgaagggggaagtgcgtggatggcgtggaaagcgcgcctacggcccctagggaggggtgaggaacaagggctggatactccctgttcctccgtgggtttggagcgataatgaccgcgggggtgcagccctttgaggccaagggttgggggtttggatgaaaggggtagaaggtatcctgagaccctctccagccacacaaccccctcccctcctaaagctggtgccagcaggtgagggaaggaggggtgctttttagatgctccctaaaagacgtgaaaatgagctcgtagtcttcctttgaggttgggggcggggagccctgcctcctccctcagactagcatatgtccaggacatacttatcctcaaggctgggcgccggctgggaaaagggccagggcaggaagacatggggagaatgagggcaaaaatcgctctcaggtttcccatggagatggaagcccagcgtctggggcagtgggaccccttttcccttccctccccagagacagacagatagacagacaggagaggctgggcacagagaggacagtgagagatggatttggaacaaacttaaagggaaagaaagcagacagaacagctgaagtccttcccaggggctttccccccacctctcccctcccttcttcagtctctcctcccgacacacacacaagatcaagacccataagagacgtacaggggacaaaggacagcacagaagcaaaagaaagagaaggccgggggttgaggtcccacgcggaactctgaatccccttcccaaatgctctccagccctgagctcctggcctccccaggcccagccctgctggcccgcactctccagcttcagtgaccagtggccaggggttccagaggtcacgcatgcccctgggggtggaagaagttgctgggggcctacctcagccatattcctgggcataaaacatagatttgtgcccctcagaagtcagtccatagggagacaagcacagcctctcctgcacaccccagccccacaatccaccagccccaaagcagccctccaagtgtggcctaggactggggcatcaggcgctgcagcagacacatgcactcccgcccccgtgtggcctgactcatagggctcctccaagggctgcccagggcaacaggggacgcggctggaaacgctggaaaccagccaggtttgctacaagcctcctcccgccaagcatccactgtcaggaggtctatggacagctgccaggtctgccatcccctgcccagccacagaggaaagaggagattcagccaggtttcaagaaaagccacctgcccccaacacacacacacacacacatacacacatacacacccctccctgggcaatggttgggttgtgtccattaggggcacagagcctgcgaggacccagcacctcccaccgaaccaagggaagaagggctcccatgggcatgagagccgcagctcaccagggcctgaccacctgcctcatggctgcatgcttccttccctacaccccatcaggtgggtgttatcatggtccccatttcagaaatggctactgagactcagagaagtccactgacaagcctaaagcaacactgaatggaagaggcctgatttgatctcaatatttattacgtttgtgccaccacactctccacgatgactgtttcttgagtgaacattgacagcaccacatggcatgtgtggacttcctcactgacctgctgctatccccaaccatggccctgggtcttgggtggtccctctcaccatggtcaccatcctctgttgtgctccccaaaataaggtccaaatacatgagagatgactttgggaagaacattattttatgtcttctcttccttcctctttttttctttttctggggggacagggtcttgctctggcactcagcttggagtataatggtgtgatcatagctcactgcagcctcaagctcctgggctcaagagttcctcccacttcagcctcccaagtagctggaattacaggtgcctgccaccacacccagtgaatttcttcctttttttagagatggggtcttgctatgttgcccaggctggtctcaacctcctaggctcaagtgattctcccactttggcctcccaaagtgctgagattaaaagtgtgagccgcggaccaggcacgatgactcatacctgtaatcccagcactttgggaggccgaggcaggtggatcacgaggtcaggagttcgagaccagcctgaccaacatagtgaaaccccatctctactaaaaatacaaaaaattagccgggagtgatagtgggcacctgtaatctcagctccttgggaggctgaggcaggagaaatgcttgaacccgggaggcagaggttgcagtgaacggagattacgccactgcactccagcctgggagacagtgtgaaactctgtctcaaaaaaaaaaaaagaaaaaagaaaaaagaaaaaaaaaagtgtgagccaccacacccaggtctttttttttttttttaaatacctttattttcataaggattagaaaaagccccaattagaaggtcaaaccagtgatttcatggatatagttccttgggatggtagtgaaataaagtttccttttaagtaaatttaaagttcaaagtgagctaacaaaaacgtatattgcattagtacagtacaaaaggtttcctgatatgatggtaattcgtgaaatagaccctgactgagtgagactgggaacactggggccatcttcctgagggcccagtccctgtctttgaggtacttgtggcaacccacagtggccagaagtgtggctaaaggagagtggcctgaataatgcctccatgagaaggctgggggttccctgggcgctggagaaatagctccaaccaaagtcagagggttgcctcccataacccctgaccttcctcctcctccactcaccctcaccaccagccagaggtctgcagcccattgggtacaagtgagaaggaggggaccctctgaggccaagagcctttcctttgcccaggccttgtggattctgccgtggccttgctgctggaatccagctccacagttcaggcctagtcctgcctgagccagaaggacccctgccccttatgccagagatccaggctcctctgccctcctagggctcaggacaacattgggacaggtctccaattatcatctcccagctgcttccttcctggagccaaaagagctcctcatcccctctcttaccccctcctcatgccagcacctccttccctacctcctgggggatctcagtgtgtctggggtggagcaaacagtgtaccagcctgagatgagtggtgactgtggagtgggagggtccccaggtcacccagttctcccaggcagattatggcagggagaggtcccagctcccagctgctggagcaggcagagggtagggcatggagctcacaactgcactatatgactgcagtcccacaaatctcacagttggcagtggggaggggctgctgagcagcctgcacagacagggaagcagggactacccctcactgcctcctccaggccgtcgctcagccctcaggtgctctggcattggggctattggggtgaggcgggcaggagctagatactaaggggtggcagagagaggggagggggcaggagagatgatctgctctctctgaggggcggtggcaaggaggagctttgatgtgaaaagctttagaatctgtttaagaacctttgagatccttggcttttatataacaaaaaagtaagctgaggctcggggagaagggaacgcctgggtagcctagctgtcctggcttcctactttgtacagatttaacttctttctgcagggccccagctgagctgggaggatgaacctgggcttctggttgagggtgggggagcatcctgtccttaggagagggaagccagtgaccagcctcctgggggggctctgaagattcaggcatgattttaactccttcagcaggccaggcacttgaaatcagaacactgggagagaaaaacccaggccagagacaccctgggtgtcttagcaacttttctgagaccccaggctagccatttatttattttttgagacaaggtctcactctgttgcccaggctggagtgcagtggcgcgattatggctcagtgcagcctcaacctgggctcaagctagcctccagcctcagtctcttgagtagctgggaccacaggcacgtgccaccatgcccagcttattttggtggtctgttttgttttgtagagatggggttttgccatgtggcccaggctggtctccacctcctgagctcaagcgatccacccacctcagcctcccaaagtgctaggattacaggcatgagccaccacacacacccagcctcattaatttacttactcattcagtcaacaaatatcttccctctctgagcctaagaacctaatttgtaaaatggggatgttaacgtctaaactctgcctttgggcactaagtgagaggctggcaagacaatggtagagaaagtaggttgttttctttttttcattttctgttttttttttttttttttttttgagacagagtttcactctatggcccaggctggagtgcaatggtgcgatctcggctcactgcaacctctgccacccgggctcaagcaattctcctgcttcagccttctgagtagctgggattacaggagcccacaaccatgcccagctaatttttgtatttttagtagagacggagtttcaccatgttggccaggctggtctccaacgcctgacctcaggtgatccgcccgcctcggcctcccaaagtgctgggattacaggcgtgagccaccgcgccaggccaaagtaggttgctttcaatgaaagacattcctgagcagcgatgggcttgtagcagcctgacctccctgttacccctacgcctgttccagccatcagcaagtcctcggagtggccctgacccccctcggacctgagcagcccagggaaaagacacagggatcgattccaatctagcaagcggatccaggcacctgccagccctgcacagatcaatgcgtcctgttccaggcagggagggcatgagagacccgggctggggtcttaagcatggctgggttctgctgggagagggataggggcattgcgatagagagagacggaggcagggaactctgggggaagggaagcaaagctaggataccctggtggaggggcgttgggcctgaaggttccccccaacccagggatggggttggggaaaccagagacataagggagggggctcagggcttctcttttctccaaggaacctcagtgtgcaaggctgactatattttttgagtccgagattcaagccacagggaagatgccaagaactggcgaaatccagaatccgaatgaggggaagggcagggtgaggaaggcgggttctgccaccctcagctcagcctgccccgcctgggaaacgcggaaggtgaaagtggcctgaggctggggtggccgggaagtggcgggcgccccccagtggccggctaggaggacggcacaggtgcttgggaagagtgacgttgtcatttgtccgaacaattccaaattctacgtttatttatcagcctcatttatttttatcctccaccacattcttttacatgagatcactgtaactgattatgagaattaagatcccaacatcttagtgacaccatctcataagccaccaagccggtccccaactggcatctttaccccggatgtaaccctctactctgtcctctggctgcccctgggcaacattcacacatgatgtcatctgcaaaggaggagaacggggagaggagaggagagggagggagaaggaaggagagaggcaaatggacaaagtagaggaagaacgaagccaccagctcaggaaagggagaagagaactctctggggcccctgatgtgagtcctccccagccccaaactcaagatctggaaatcaggtccctgtaaccctctctgtggagataaggaggctggacaaaacccctcccttggggacctgagaggctgtcacatgtgtgccccgacccactgcctgggcaggggtaggagctgggttatagccctggcaggaagcgagggcaggaggcactcagggtgaagacaccaactcacaagcccacaggacatggggctaggcagggcagcaggagaggagcatggagacagctggaagggtggaggacctgcctgccttaggccacacccacacacacacacaaacacacagcatgaggctcccccagtccctcctctgcagccaatgctacaggagcccaagtcagccaggaggagccccgaggcactgccaccttcgattgtgcatgatgactccatcctgctgggtgcctgctgcagtcgggaagcacacggtgtgcttggaggttggaggccagaggacaaaggtcaaccgggaccagatatgtatcaaactaggcagaggctctgggaacccgaattaggagaggggatcctttgcttcccctgctagtgaaggaatcggcctccctgtccctgggtgcccctggctctgccttccttgtgtgcccatactcctcagtttctgctggctggctgtgggtccttggatcagaagcccatctgtgtctgttttctaaaaccatcttttccgccccataccacagcaaccaaagtcattttccgggcaattgcctttctgtaaacattcctgtgtaatatccccccaaattgctaatacccagcgccctgttgagtctccctgtcactccaactaaagcctcggagatgagggcgtgtgatgggggaagggcgatggggggaaggaggcagctggactgaggattggagacagggggctcctgcctagctcctggcacagagcgggggccagaaactctgcacctccccacggtgatccccactccctgccagcccagccccaccccctgaatgtcaggctccacttcaggagagtctgcctggactaggagggaagacagagaggaagtgggaagggagcccactggacagaaggcctgagacagggcctgggaggagaaggagctgagttgaaggcatggaggagatggctagaaaataaagactcctggtgactagggcagggcactagggacatggggcaaggccaggcaagttgtcttcaaggaatgccagctcccctccccaccaagggtgacaaggaggacagagaagagggtcgaggccagggaggatcgaggccatccccccagcgtgggccctgcccactccctgggcactgtagtggatgggggcggggggagatggacaaggcaagaggtgtcaggtggttcttggcaggtgatacacctgttgtcccctcctccacctcccagccctgatctataaagccaccatggagaagggtctggagcaggctgattctcctcatcatacagcaagggaaactgaggctcagggaggtcgagtgatctaatctgagtcaccacatggactcccttccccaggggtgggggtaagaagggggactaggactgtggcctatgaccctgtggtctcttccatccccctgcccagggaatactgccacccccttcccaagctccacagaagctgggcatccaatgggatgggggatgatggagccctggagggagctgggagcagaggtgatgcaaagggcagctagggagggtgcagggcactgccagtcacagctttgtgtaggcagaaaaacacaaaccaatttgtgcagatttaaaacccactgaaggccacttagttggtaaacgagtcagaatctaattaaaggacctcttcgaggctgggggaaggcactgacacctgcctaggaggagcggtgaggctgggggcctgggccctggctgctactggtggagctgctggggctttccatggggagagcagatttgagggggtcaagctccctgcgggtgggcacccggggaggggggcgggcatcagatgcttccccagcccagctcttcctcctcgcccatcccaggctgactgtgtccacttgcacagacctgggcactcccagggcaggaccctcacctcctccctcagactggggcctcccttatggcagaagggccattccacccagaagggcagaattgggtggggtgaggaggcccacccaccacatcaggagtggggtggggtcctggggactctcaaagatcccaggcttggcctcggtgccacctccaccaactgcactggctctgcatggctattgagtccttgcttccttctgcttgcagctgtctctcccccagggccccaggccacacagcacagcagctctcagactctggtggtgaggtggggcctcccctcagctctcagctctcgggaagaggtggccccctccttacccgtcctgtgtcgggaaaccacagtgctctctctccagccagatgcctttcctaggcaggaaaccaacacccagagtacaagcctgacccaatctgcaggagctgaaggcagagcccaaagtggaacccaggggtcctggccctcagggacaaggatttttccattccacgatgccacttcccagaaagcagctgcctggggagcccctctctaggccacgggccccaggaggacacagactaacaacctccttaggaaggatcagcagcaaggcagaaacaccgcagcagcccggccgacagggagaaaagctggggtccatggcccagtgatgcccccagcccagggggatgctcaccacacagaaatcagggtccccgcagggcatccgaactgcacattcagacaagactccccatccttgcaaaatgtgcaaatcagccccgtgcccagaattccagatatacaaccctctttcttccccctgcccctcctctttcacacacagcaggcaaatctgtgacattaccaaaaaccactgcatccactgactagttatgtgaccttgagtaggtcaggggatgctcagagcttcagtcctctcatttgctttaacaaaaaaaaaaaaaaggaagaagaagaagaagcagaagctaataacaggcaacaggcaacaggcaacaggcatgcagactgcagagcctgggtgagcagagtcagtttcttctgatctaccccggagcccgatttccttccacccactgtcagagttgtatcagacccaggactgtggggttgtgatttttggcttctaatgaagatctggctaattggcttccctgggaaggaagggggcagagatatggagggcagcatgtcacccccagtctgaagctggagctggaaatgctgagaacagccctggcatgtgcccacgcggcactatgttaaccagctaactcctgtgtggcagctccactgctcacgcgcccagggaaggtgtcctgtcagctccacatctccttggagaggcagccgaggggaacacaggccgagcgggaggggaggagggaacactggagggtgggaagggaggaaggccggtgcctgtcctcagctctgccatcactctgaggaggctgccagggcgtcttctccccagggggcactccagcctgagtgctgcgcccctctgtgtgtgaaagggatctttcctccctccctgcagctgcctcaggctgaaagcgtgcccagggggaagcatattgtttccaggggaagagactccaatctgttggaagtgagtggtggaagccccacccaccatcctgcctccccacagggaagcattttcaacaccaagtactcatcaacgggctcatcaatattgggcaggagacccagccttgccaagatgcccttgatatcctcctcagagacaccacctttcatggggacaggctctccctaggaggccttgtcccagccctatgacctagtagcactcagacagctccctcggccgctagaaccagcaggattcctccgggttcccagcacacactcagtcgcccaggcacacacatctgctcactcatgcttctacgtcaaacctgtgcacctcggcatgcgcctggctgcccagtacttgctcactgacatgggcccagtcacagcctgcctcaccagcactctccacctgacctcaggtgatccacctgcctcggcctcccaaagtgctgggcttacaggcgtgagccaccgtgcccagccatgataaccactcttgaacacccacacgtattcatgacagtctacatgcaggggtctacatacctgggcccaccagggtgccccactctgccaccttagatgccacgcagacagggagaatgtcatgccagtccacgcagctcatgcagggcatctggggctcgctaaagcgccaggtggatgcatctccagcttggggtgaaagacagtggggacttgcccatcctgagtccctcatggaggcgacatcttcagctccttttccactttgccaggttcggggctcccttgctgaggtgtttacacaatgtcttaaaatacaggagtcagcccagtaacctcaaggccacctactctgaccaatgcttagccaatggggcgatgttcatgagtgagaccctcctctgggacctggttgcctccagccctcattccacctctgtaggtgctcagcgcctccaccagggcgagggggccggagagcctctgcccagcttccagctctgctgatggggaaggacagggctgctgggacccaaggcttagctctcacctcatgggttaatttctctgccaccctgcaagctagctaagaacaaacagccgaatctgcagcccatgattctctctccctagggacaccctgttagtatcccgagagactctggaggatggggcgagggcagcccggagttcacagtttggaaaaggcaggagacttggcaagtcggcttggcctctgggtcaggcagtctttggaagccagggcctggtcagatagcaggggcatcttgtggaagttctctttgttgtctaacctgagctctcccatcagagcagcatctgggaatgtggagcacaggcttcaaggcaaggaaaaataaactgtctccccttctgcgaaagacacaaagactcccaccctcccttctccaatccacacatccatcttgagtgacgagggttaaacccagcatcgggctttctggaagctgtgggaaatatggaccagccatgaaatgataaccactctttttcttgagacagtcctgctctgtcgcccaggctggagtgcagtggcacaatctcagttcactgcaaacccctcctcccgggttcaagcaattctcctgcctcagcctcccgagtagctgggactacaggcccgtgccaccacacctggctaatttttgtattcttaatagagacaaggttttgctgtgttggccaggctggtctcaaactcctgacctcaggtgatctgcccgccttggcctccctaagtgctgggattacaggcatgagccactgcacccagccatgataaccacccttgaacacccacacatattcatgatgatctcaaagggctcgtgcagccatcattctcttcattctcacagtcaccttgtgaggttgcaaaccccctattttacaggtgaagaaactgaggctcaggaaggagtgacttgtccaaggtcagagttgataagtggaagaggctgatctcaactgccggggtgcttagcccattagcccatgtccttcttctttcccctacactctgttgcccctgaggaagatgctgattctgccaccaggtcatctgtgagtactcatctaagccattaggccagagccccacaggtcccctctgtccttcctacaccctaagaagagaacgctgaaacaaccctccttcccagctaatcttgggcgccatccacccagtcctcttgggggggcctattccccagggctggaggagagggaggaagcagagccacccccagatcacagaaacttaggctggaagtgggggtcccacagtcctgaaagaccttctaggggatccacctttccacagccctactcgtagccttcttgtacctatgctggatacgaagccctcccagcccctgccacaggctgtgcagagacagaactgcaaatcaggagctccagccagtcaggtcttagatacttccaggaaaggagaactcattacatccaaagcaccaatcatcttgtggggtttctccttccttaacatgagccacagtctgtgcccatggccctcaggggaacctgggggaaggtcatgacctctccctttggagcagagtggaggctcctgaaccggaaccttctgtcataagccctcaggtccttcctgtgtggcccagccccccagccatctgcaccaccctttgttgggtaatccccatgtcaccacccctcttggctgctggccttcagaactgctctaatggtccagatgaggtatgagcagcacaggtgactcctctctgcttctgttactaaagtgccttcgctagtgcccctcctgcccacacagcacatgtgccaggaaaaacaaatgctcagggcctaagagcgctgttccagggccagaacataccttccttgcctcctgctcctaacgctcaggcctcccccagcctcagacctcagggggccagcctgactcctcctgcctggaaggggtgaagttcctggcccagtcagctgaaactgctccttccagtcacttccatttgctttctggtgcctggccttgctaatgtcacttaaggggtctggtctgaatcttagcacctcccagcaactatgcccctcagagccccagctccagacaccaaagggtgtgcccaggagtctgagtgggcagcccgctctgcctggaattctctggctagtggcctgaggcccaggatgcccctgtctggcagccagtcactgtgagaagtggaaaaccacaagcccacatgataatatctgaggcatattaaccacacagtgcttcctccttgctaacctacttcctcctccctgccctgctgccagagggccccaggcttggaaggagaggctcccccaccctcagctgcttccctgcaagtgccccgtgtctgcatcccatgcttgcgcagtggctaattctggtgtctcatcagacagtaattatgggggaatcagcagtgccgtcatctctgcagctcggcacctgtcaccacgccgccatccccaggctgctgggatgggatcggaagctgagggaggagggctgtgctggggtgaggggcatctgcacccttccagcctctgcagccctcacttccctgccctgcctccccaaggtgagcagtgcacctcaaccaggtggtcaccagccacacaagtgctccctgttacccgggacaggtactgaaagcaggtgccatgtgtcccatgtatgcatccccatgaccaaacagaacaggcagaaggacacagcaagccaaggctcaaatctcaccttggccacttcccatatgtgtgaccttgaacaaatcatttcagtcctccaggcctcagtttccccaatggcaaaatggaaaaaatagtgcctcccttgtgaagatgggaagaaataaggtgtgtaaagtatctagcacagtgcctggcacatgtgtcatcatgtagtcattcaacaaacaattcatacacagctactttaatgtgttaggcaatgtggggatgccaagatgaatgagatgatttagcaaggatcacactgtggctacactgaagcacaggctttttttgttgggggggttggggggctggtggtgtttggttttatttctttgaattttaatacctctaaggagcacaggaagtgaggtaaggaagggagggctgcagaggctgcaaggcacccctctcctcaccacagcccccaccattccctatcatcctcatgcatcgcttccctcatttgctgtccctgaaggtactgagtttgctgcccccacaagcaaaagtaggctagtgggcttagttatgtccagaactggtgattgttcaagaaaggttacattaggagccaccagaggtttgacagtgctctgggagatcggaggggcgagcccagaggcggttgttggggaagggcatttcagggaggagcaggaatgggaggtgatgaagaggagctgagccacagaggcaaaggcccacagggaagaggccagacccaaggtgagctgctggggcccccacctggctgcagcacggactcctcaggaggaacagggttggggaggaaggtgatgaatctcagtgtgaattctccatggcgctgggccacagaggagccctgctgccagagtgcagagagtgaggaaaaggggcacgagggaatggggcaagacccatacaaagcttcaggtgaaggcggaggggaagggagggtgtagggctgaggctgccctgctagagactgggactctctctctgacctcaggcatgctacttaacccctcaggtctgtcgtctcttcccccacaaaacagtcagcagcagtgagctcacaggacagttgtgaggatgaaatgaactaacacttgtacaatgcacaacccagcatctggctcccaggaagcacccaataaatactggccatcagtgttttcattattaccagtgatgattttttttctcaaaactcagcaatgactaaatgagccccatcccctgaaagcccacagagggagcacaggtctcttctaaccaaaaccagagtcaacagtgaggggctgaccccggtgtccactaccatggtagcctcctcccgactcccaccccctacaccctcactaggcattgcaatactccttcatagcacttttccaaaacccatccacatcttattccactctggctggtaaagccaggacggggctgcttcacctttttacggaggcagaaagtaagtcttgtaaggtactgagctccccatcactgggggtattccagaaaagggtgggtgaaagagaagaacattcaggtctcagaggcccttgccctggccccctctgcctggttcactgcccctgagcccaccctgcaggctgagccttggcccctctgctgtttgtgcagggaagcgggggtaactcacgcgagcaaggagggaaagggctccaatctcaagtctctccgcgttctcctggcttctcccggcagcagccaaggatgggggagggaggggagcagtgtcgttgctcttttaggaaaacggtaattttaattaagaggcagacaaatgagcgctctgcagattgtctcagagcaaagttattaaaaagccatcaaggcggcggcagccacggtggcaaggagagctgcctcccccagctgcccacccagattgtagctgaatagcagttcagagagctggaaaagggctggaggacgtggaacctgaaaatagcccctctcctaagaaggcagggcagcatccagatagtacccagggtacagcctgcccaaccctgggcagcaggtggggacgcaaagggcacctgcaattaggcagcccctgctgtgggccaagtctgggcccatcactactttttctttactcttctcaacaatgctgcctgggaggtgttcttgtaccactttacaggcacaaacactgaggctcagagagggaaagtggctcgtccaggctcacacagctaggaaatggctgaagtgggggtttgaacccagggcaggctgactctcaagtccaatgctccaggctgctggtcctgggcccagattttggggggcggcttcccctgcccatacaccctcctccagccgggctgtttgatgtcctctgaaacagcctcaggagcagcctaatgatgttgcccttagccatcaaggtcactagggacttggaggccaagtaactgcttgcttggcaggggcacattatgagaggacactctacagggacataaagttacaaaacagcttccagcagggggaacaggggcagatagacagaggacaggcccccacagccaggatatcttccaactcttcaacctctacttgctcaacacttaagcaaagcatccaggaacctatctgccttggttgctgttagactctgagcctagcccagtgcctggcacagagaaagtgttcaataagtctttccccgccgccccgaccccgagatggagtcttgctctgttacccaggctggagtgcggtggcgcaatctcggctcactgcaacctctgcttcccgggttcgagcaattctcctgcctcagcttcctgagtagctgggattacagacacccgccaccacacccagctaatttttgtatttttagtagagacagggtttcaccacgtttgccaggctggtctcgaactcctgacctcatgatccgcctgcctcggcctcccaaagtgctgggattacaggcgtgagccaccgcgcctggccttcaataagtctttattgaataaatggatgaatagataaacaagcaaacaattgaataaatgaaacgagatcacaagtttgcatgtgactgtaagctaaacaaaatggtcccatcttctcccatcccccaccctctgggcatcactggaacatgggcttccccccataagaggtgccccttgctcctgacccctctccccaggccacaagccccctcagcagaggattcccgcctcttctcttcaccccagccctagcttacatggcggctttgcagcctgcacacacatgtacatgcacgcgtgcttgtacacgcacactcactgacatgcacacacgtgcacatacagacatgttctctaccagccaaagtgccccccccagagtcaggtatctgctgccccctcccctggcaaaggctgggcccaccagggatagccccctctccgtttctggccctccaggctggggaggagcatctgactacggagagctggagagctggcaggaggaggaatcgtggggggcctccctcctcctggcttactaacctggagactttaaacagagggaacagagtcctggaggcttccctcccgccgcacgctggagccctgggtgagggacaggaaaggaggaaagtcgtgaatgaatgcccagaaaggcccggctgcagaggagctggagagaggagggggccggggcaggggctcccaaagtgggctaggtcaggggcagggccatgggccatggggttgggggaggtgaagcaggtacagagcaaggcagagccttaggagctctccctttggggccccccagggcagacaggatagagattgggtgtcataggaagagcagggactgagggggtagagacactggtgggagacagacagggggacaaacagcaggacaacacagaaaacatggggtccccagaactgggttcccaggacagacagccaacaagccatgcctggttctccacccagaaacaggggcagacactttactgaggtgcccaacctagaccccaaatgatagcccgcctgcctccttcatgccaggttatgccattctggaaggttgatgggttcagggtcagagaggcttgccatcattcccctggtgacaaccctctccccagcctacgagacccccatctgctccactccccactaaccctgagaatgcccagcttcccctgcctgtgttagaggagacaggcattccccacccaaaaggcactcataggttcacactgtgctaggagcacagacctgcctgaagtccttcacctagctactgcctccacacccccaaccctcaacctgccatggcagggtcccctacagctgtccaccatgccccaccctttagaaaggttagaagtcctttctaaacctactccacctccctcatgctgcaatacctattagccttttaccctggggcatgcagcagttaagacccttcctgccgggagacactgtggccagcacccactcaggcacagccctccctgggctggctcagacccatccatacccacaacacgtctggctacaagcattctcagagccccctgccaatctcatggttccaattttcccaccgattacctaaaacatcgacatcccagggagaaacagctgttgggacacggactgggagaaaatattaagaatgctcattgatgtgtctagccccagagaacttcctggatgaggcagtgggaggcacaaaagtgaaggcttaggagctccagcttccttcttaccaccagccctaagtggcagctccaggggcccagccccagacaggctgaggtgaggatctgggttttcaaaaaatctaaagaggtttcttatgtatgcccttttctcagtggagagtgggccccattcaatcattcagtcagacagaggaagaggaggaagataaagatatgactatttattgaatgtctactatgtgccaggaactctgcctaaattacctcatataatcctactacccactctgtgaggaagccagtgttaatgctcttgatctacagaaacagaaactgagcttcagaaaggtgaagcaacttgccccaaaccacacagcaaatgactgtcagggctgcgattgcagcccagagctgtctgactgtagaccctaagctcttgacccaggagctaaactgtctcctatccactcccacccctctctcagtctttggctatcttccttttggtggcctctgggaagttctgcctaaagaaattatctcctatgggcaataaggtagaagagaagatttctcttcggctctgcctcgtcctaagagtgggaggcagactgttctaaccccaggctgccagtggaccaggagggggtgagccatcaggttaaggagagaggtgggtctaggttttcctgagctttatctttaggtgacttctgcctctctaatagccccttcctgcccctcccacttccaggagagaggaagctccaggaagccccgcacaagccccttcacgttttaccaaccagaagttcccatagtgcccaggtagaggagagcccagaagttctggggtggacaaagtgagagtctgcggcagtccccacagcccttgcctctgcacagagtcctaactttccatggataagggggctggggacaagaatgggggactcatcaggccagcctggtcactgggtggggtggaataggcagcagacagcccaggagagaagacagcaaggcccatcccaagggcttcaaggaaccatggaaggccttccctacgagctggggtcattcattcttcccataagaagcagaggctggtgtctggagtgatgtctgctgcgtatgcaattatcatgcatcctaggggtgaggggagactgcagaacacgtcccccccgcaatctccccagctctgcacaagcagaaacagctaggctctttctgtggggtctctgggtctggggtctctctataagctgagtctgggggcccctctatgggcccctgggtctggggtctccagcatgctttgccagctggaatggaaaagaagccagtgccctggaatgcgtgtgtttgcacaggtgaggaaggcaggcatgagaaaacccaactcccttccagtcttgggttactccacatcaggacatgcaggcaaccgaggcaggtggcctgggctaccaggagccaggataaggctgtgggggagctgagccaccagcttgaagtgccttgtgggagaaaacccgaattggattatagtccccggatggaatggagtgtggcaaagccagttctgctggggtgggaggaaaacagtgagtttagaattcagaggacagctgaatcctctagccactcccttctccatcccctgggctgggagggcagatgtaggcaaggtgtgccttcggaacaggagggggctgtctgtaaggcatgagtgtgtgtgtgtatgtgtgtgtgtacgtacgtgtgtgtgtattccaatattctcttgggccaaatccccattttttttttcttagcttaagctgggaaacagtcttcccaccctccatgtggcaaagcaatattatctcaagggagaggaggtagagagagcctgggagctctggaagggagcttgaaggtcctctagtcccaccctcttttcttataccaaggacactgaagaccagagggggcaactaaattgccaaggtcacacagcagtaggggagacaggcaagctgactccagcccaatgcttgttctttacaatttacttctttgccctaaggagcagaggagcagcttctctctttctcctcctcttctccctctcccggagcactggatccctccccagcagggtcccctgcactctggcaaccacaccagccaaactcttcaggatgcccaaagttcatctgaaaggtcacgctgaccagtcccctgccgctaggtccaacactagtctacgggtgctcacagaccaccgtcattgaggtgaaagatgcaaaaataccactggagcctcccatcctgaagtggccacacgctgggaggtttatcttcctatctaacctcgattcctcctactacagcgtgggcctgcttcctctcaagctgtcctatgcagagatggaggcagggggagaaaagcaggtttccagcctccacacccttatgtttgcccacccccagcagacaggatgagggcagggtgtccctgggtggctgggcccaagcccagtgcatgcgtggggcccgaagggtgggatgagggaacagcagcctgggtatgggggaaacagctcttctaggaatcgcccctccaagtcctcatcctctgcaaaatcctaactaagtctcaggcttagacttctctaaggattattatcttctctgggttcagagatgtctgtcccctatcccctcataattgattgtttattatcccaacaataagttgattgtttagtatatgtccggcactgtgcgggatgttttcatctgttgtttcatttaatcttcacaattccaggatcagaaacgaatctgtcccctgggaccatccttccttaagactaagtctaaccttgatctctcttgctgcatttcctctggcccagtcctccttggtggcatttttgttcctgtcttcagagactcttctcatgactcagtggcctacatgatctttttccaggctatcaacctttacccagccctgccccaggacggggtagatatgtaggtaaaagcgaccaaggcatgcgaagaggctctgggggaggtccccaaaaggtcaggcagggctgttggaggtacgggcaggactagggtggcaggctctcctccctcataatgtccatgacccctgcagggggcctgggccccatcttctgtgtggtagctaagagggcccagagaggcaatgaatgacctagtccttctcactgaccatctctgaggcccaggtttcagcacacacatccccagagcccaggggaatgggcaaaagcaggcaggggcacaagggcaggacttgccatgggttgagcctgggaggtgaagccggaggaggagctctgacacctggctaagctcccggcagagggctagcaggccctggagggtgcacagcctcaagcccctctgccggctgcagtatcaggcctccgtggggttctgcacaccccatcctagctagccacaggcaactttggtgaattcacccaccacttggcttctctgttttgaccttttggagcagaagtgctgagggcaggggtcccctcgactacagccatccccccaaccctgcccccagcatggctggaacacaggggccagactcacctccccagggaatgctcaagcccagctttcacccctctgggaaatcggagcagcaaaagcatgggccaatgggcaaggggagttggaatggtgggtgggactctgggccgggtgtgggcggcaccctcccccttcaagcaggcaccattaatatatgcaaagcatatgcaaatcacccagaagagagacacaacaccgctggaatgtcacaagaaaccttggagatcagccagcccacgccccctcatttcacaggtgaggaaagaggcccgcgctgggatgggacttgctcaaggtcacgcagacatctgggcactgaggaaggataagaatgagctctcttgacttagtgcagtgctttttccaccagggtcttgtctttctgctggggggtttataacattgcaaaggggccccagggcgtggatggggctccaggcaggcccatcagagacatgggtgggagatggagctgagaggcttcttggatgcctcccttaccgcctctgcacctggagatggtctggtgggtgtgaggggcagtgcaagggcagcatagcacctggggggccgcgcggttggaggggcgggaggctggaggtaggcaaagagaaatatgaggggcagggcagaagagcagggaacctggggtgtttgaggcaggggaggaagagcccaatgtcagggcaaggtgcctgctgtggtgtggggagggggatggcgccctcaacacatacacacacacgcacacacacacacacgctcgcgcgcacacacacacacacacacatcgctaagtgctctgcagcccttcctggactctgacaattatggcacctgacagaccataatagttaacccaggcccatcccttctgaggccacttccccgcccccagcttggcttctcaaccttccagacagtcctcgaaagcagggccagagctggggaaaggaaggggaggcagacaatgggaggggtggtcagagggaggaagggggaggcagaagaagagacgaggacagggttagagagagagacagcaggaagggcagcgcaggagaaattgacgaacagggagcgggaggggaggaatgggaagacggaaaggcacagaggagagatgggggaggggcgaagactgagggcatccaggggagtgctctggagcccaggtatcgggtagaggaaccctgaccccgaggttctaggctgcttggcaggagttggggaccatgcccctgcccctctgcccacctcccccagaaactcccctggctgccaggaactcagtcctccctccttcactgcctccctcccttcctccctcggggcaggcactgcttcccagccaaatccgaagccttcatctccgctactcagagcttggaatgaaagaaggggaagcgagtacagccctcaaacccgctgacggccagatttttattatctttgctcgaatgggccctaggaagccagtgagggattcttcaaagagcatctgagtgcctcattgaagcctgcacctgcaccagcccacccacagcaggcagccaggacttggggggcacaacctgtcccccaccccccacaaatcctagagtccagagcctcagctaccaggagactcaccctcagcagcttgtgcccaagcaggggtccctaggtcaggaaaccaggcttaaagctagacctaagtctgctgggcctctgaggcagtctgtgtccctctctgggcctcaaggacataaatgaagaaagaaaacagatttccttgccagggcttggaggagataaatgcttgagattcctcgaaagagcagcttttatggcaagccctggatccttcccctgaactccctgcctgcccagcacccacaggcccctttgcaagagcaccccccaccacagctgcctcttcatgtgccccaggcctgctacccaggatgacagacgccatgaactgttcttccttgagccccaaactcagctccctcagttcaaatcctcaacactgtctcccttctttccccaaaacctaacctggggtgggggtgggggctcaacaaactgggtacttcaaagagcccagccgcctccctcctaagcacttccagggctggggttttggcagagaattccaaggttggcataggcagatggcagccatgccacccccaccctctagctctgaccacactgtcgatgcccacagccaaagaaggaatcaatggttctaattaaaccctttttccagggtgggtccctggcgagagagagggaagagggagagagacagggaagggaggggggagagggggagagagagagaaagagagagagagagcgcgagagtgcatcagagaggccctgcatcccagtgcccaacccagtatcctgcacatctttaagacgcctggaacccagcagggatgaggccacgaagaccccagaccctccgcattaggcaaggaggcaagtagaggggcaggggaaagcctggggtgggggtagctctttgaggggttcattcgagcgacccttcccctagtggagcatccctctccactcagcactccccgaggaccacagttgcctcttccagatagagctccagggcacagacagtgggagccagaagggggatttgtgcctccatcccagccttgagggtcatcacagagaaccagccatcgtggaaagggcagaagaagcaggaattgttgtggggggactggacaaagaccctcttgtccccaaggcagggtggcaggaagccagggcaaagcctttgcacttgctgccagtggtgcctgggtgccaggcagtctgggtggggacagcggggtggagggggggtgcatcttattcttggaaaccctccccttatgcccagagccctcaccccatcccttgcttctaccccaggccaccagctaagtctctgtccccagcaactctcagcttgcctggagcactccttcctgtgtgaatgttccttcccatgtccctgacacctgtatggagtggcccatcaccaaccagaaccagcaaaacccctcaaatgcaccatagctgctccccacatacaaccacaccagaaaccaccaccatcacagctgccaccagtggcgacagcctcacaatctccatcaaatgcatcatcaatttttaaagatcaacaagagggaaagggatgggaataagagaaactgaggcaaggaattagacagcaaagcagttggctcaaggtcacccagaccaagataccaagagtcgggaagaaggtatcctgacgaccccccaaaagtgctcaaaccccacccaaaggaacattcaggcccacaaacctggaagtctggtcagcttccctcactcccaagcctcacctgtttctcccttccccaaaacagacagcagctcctccatctccttttgaaaggctgctgccagaaacccccacccccagctcggggagcccactttccttaaagttggggtgctgcaggacctccttgtcccacaacatttgaggaggggggctgggaagatccccctccttgcatacttccccgcgcctgctcacctggctcccctcggcccccagggtccctcggtccagcctcctccctgggagagcgggctctgccctccgccgtcctctcccaccaggccagggcaaagcgccggaggcactgccagggctgcatggggacgcgtggggctgggggacgagcaccagcagccgcacacgccccgccgggccctgacagctgagctgcggaggcacccggcctgtcccctctgcttccaccagcatcctgctgcccccaccgacaggactcggagctggcccgggagcttctgacgtagcaggggggtgcgtgggaggggagggggggccacggtgcgtccccttcccagccccaccctccacccctcagccgcctgccttccctatcttctcactcaccctagatgccctccccagctgggggcgccctcccctgccccctggcctctgcagggggaggggttaagatcaaatagcccctccctaaacccctccctctcgtggccctccctacccgctggtagagcggggagctggtccccagtttctgcaactgctgctgaggctcagaggtctccagggctagggcctcgaggtgcggggagggggggtgtgtggaatacaggcttgtatcctggcaacgcggccaaccccagaacgcactcatccccttccctccctggaggctggcgcaaagggcccaccaccaccatcctagcccgtgcaccccattctgggagctgggggagggaggcctttgatgcacccctcacttctccatccccttcccctcccctgcatcctccacttcccccacctcggagggacgcccttctccccccaccctcctcaccatccatcccccttcttctcctcacccctcccccttccacacaagcccctttacagttgaacccctctggcccccaccccggggcgtagtgaggccctccccacccagtctcctgcctcgccaccctgcccccttctctggtcccagcactcctctcgcccgggtccttctcccaagcccggcgcacagcggtcccctgcccccacacacctgcgccccagcatccctcgccccgccggccaccgcctccccggcccggccgccgcccccgcccccggccgagggggaaaacacacaaagaaaacagaaataccttccacttaagcatggaggcacattagggaggagagagacagggacatgccttgggacggagcgttccccatcgggcgggggcgcggggggcgggggccccgggccggcctgcctggcgctcgccctctcgccgcctcgcgggctcctcgctcggccccagccccggggcgcggtgccaggcgggcgggccgggggcgcgggccccgccggggtggaccagctgggagggcgccggcggccgggcgtgtgggtgagcgcgcgcgcgggcgtgtcaccgagtgtgcgagagcgagtgtgtgtgtgtttgagtgtgtgtctgcgcgcgcgcgggccggcgcgggtgtgtcactgcgggcgggcgcgcgcgcggcgcgggcgcgcgcgtgtggccggaacttacaaagggccgcccggggcggcgggggcgggggaggggagggggcactgcgccttctcgcgccctccagcttcaccgcgtgatcccgcagcgcgcggccggggccgggcgcggggcgcgctcactctctccttcccgcgccacctgcttcgtcccaccccaagtagtcttcgcgccacgatagagacaaatacattgaccgaggaccggctcggaggaggcacccggggaagcggggacacttggagggtggaggactcctgggtctccaagcccgggcgcgcctagggatggaaaggctctcggggctgggtggggaggcggggcggcgagactgggggctcccttcagccaaggtgaccgcggaaaccaacagccgccccatgctgggagcgcccggatcctcctctgcttctgcctcgcgacccctcaccccagcgcgcctagacgcggctcggtcggagggtctgggctccccggcgccccctgctgggccgccgcctcgcccccgctccgggttgcagcccctcctgcaggcgtgcgcgggaactgcaggcaggtccgcgcccctccggccagtgagaccccaccgtaggacgctccagcgacggtccctgctcacgcctcgcttggcggcgtcactgccgcctctacttcagcccgcagagcactagctcggctccaccctgccgtcccccgcccctccgcgtcccaccttcgttggcctacctgttggctccgcagacttctccagcgctgacccggacccagacccagacccaggcccgcgccgacacctcgtgattccagcggccccctccctccctcgctccgatgctctggccagtcccttctctctcaagctttcttgcggaggagaaggtgggctgagtcccctgtcccttttatttacttctggagtttccaaaagcagtttaggtgagcaagagagtggacacagtacttctattcactgtgggccatcaggcagagtggcaggcaggcagagagcccaggagaggagaccccaccccaagtggcccaaatgacaaaccggtttccccacttcctggtctacccagttgcaaccttaatctgggctctcccaatttcctatccacccccaggcctgcccctgagccaaccacatgcccagctagggacaaggtcccagattccccttagagataaataaccaattgcagtaactcagatgccagggccaggaccagaggagaggcccttcccagctccagtgggacagatcaggaggacagccaagagctgtgtcctggacacacagtctgggcacacgaccccagcggcaggcaccctgacttcttccctcctgggccaactgcctctccctctgccaactggatggtgcccatcttttggc

SEQ ID NO: 584 - DNA, 272093 bp, Homo sapiens
  source 1..272093: mol_type = genomic DNA
gcttcatacacgcttgttgaatgaatgagaggctcctgatttgaagctttcaaatgtgtactgttgctatgagcaagtaaacagattatggaacacatacaaagtttagcctcttagaaggttagtagtttgaatgtgtcccccaaatttatgtgttggaaacttaatacccaatgcaataatcttgggagagggcacctaataagaggtgactggttcatgagggctccaccctcatgaatcaattaatgtcattgccatgggcatgggattgttatcatgacagaaggttataaaagagtctgcccctcacactgtctcttttgcccttctgccttccaccatgagatggccctagccagatgctagtgtcatgttcttggactttccagcctccagaaccatgagccaaataagctgtttttctttatgaattacccagtctgttctattctgttacagcaacagaaaatagactaagacattttcatagcagaggagtctggaattcgcaagagaccatcattgagtgatgagcatttttggtgggaatgagtcactgaggctgcaaggaggcccttccatgaagatccagcagaggtttaatcagaaagagagactgaaaatcatcaccatttattatttttcatgggcagccccacaatctcctttgggcaacttgtattcttccctgatacaaagtcttggtgggatataaaggccctggagtatttcttgactgcagcaagcagcaagctaccttcatcatgaaatcctgcccctaatcctgctgtaatgagtacaatgctcaaatcagaggcagtatgacaaacttataaagagcatgggtttggagttaggcggactgaattcaaattctggcttctctacttcctagcctaaccttgggcaagctgtttagcctctcagagcctcagtttcctcatctgcaggacagagtataataatgatacttaccttcaatggtgtattgagaattaaatgagaaaatacaggtaaagggtttaatctagtggctgggacagaaataagtggtcaataaacagttcacaaacacacacaggtaaaaacaaaagtccaagaggttatatgacgtttgtagacaatgaacatcaaaatgttgcatgtgccttgatgtatcagtacccagtggcctctgataatttatcttaaacttttgaagacactttctgcagatgacagctactactcccaacttgcctttgctttgacatttccaaaccctctttccccagcagtcatcctacagttagttaccttcttcagttagctctacaatggaagtggtcctccttgtaaccttaccttcatcttgttggatctgagctaatggacatttcaaaggtgtttcctgggggaagcaggcagacagtgtggactggaggatggggactccccccaggacctctccacccctgatgtgccacctcgccctttcaaaaaccactggagcatgtttgagaaaagttaagctgttttatttcacaggatagctccacgtcaaaccagcaggcaccatcagaatacgcgacagaggatccaatcagacactctataggacgggcgtttggtcgtaaggtagagaaacgatatccagaagagggcaacatttatcatcacgtggggacaggcaaccagcaatttcctagggtggttttggtctgtttttcctgtcacaatttggggaggaaggaaaccaaaggaaacaaaatagaccagccactctgaagcaatcagaatcaaacctattgccaaaccatgtaaacagtcacactgccgggaacaagggcctgggcagaaaccctagccaggatctacttccgtctaaggaaggaaaagtgcactctggttgttctggttcaaggaacagctttgttattggccggggacaactcacacagaaaggaggtgtcaacaaggggcagcgatggccatgtggccagtcccagagggacagcaggacactggcagatcaatctcagggaggtcaggagggcttggacctgacagcaaagtcccttctctcggctcccctgggcagctttggatatgtggggaatgttctatgtggctgctcagaggagaggagaccccagagaaccggggaagttgacatgaaatgtcagcattagctctgcacagcagaaaatcagctaggcaacacctcggctcacccctttctgcctttcctcctggccgccaccccgactcccagcccagcaggggctaaccccatggttgtgagccagccactcttctttctgggtttctcaggagagtgaggcatttgcactagtgtggaaccatctggatgtgtgaaaagttaggaatagaaagactgagaggaagaaccattacccgagtcctcgtgtttttccattagctgtggacatgcactgaatgccacatcacgaccaggtcacgagaagtcctccacattcgtgcctcctgaatgacagagaaatatacccaacaaggcactccaagggactccaacagagaagaaagccccacataaaggccccttcccacactggttcctctttgtgtaccacaaaccggttttaaatgtttataaggcagatctctgaactgctggttccagccgatagccaaaatatggctcaatttccctgtgtctcttcccactccgatttcttcattgaatagaaacctttcatcccttgggaatccatctctctcctgacccctggcctggtgacttcagagaaaagactccaaagtctaattcccaagctcgcaattccctccgattgtgcactctgtccggggttcaaaaggcgcttcgaggtgagaaatcgttagcactgaaacaaggaaaggcaagaatttttcatagaatcccacagctcagagcagctctttaagaggaaaagggaataaaaggggacggggagagtggggtaggaagcacagcttgttctcaattttatccaaaaagctctttagtggcagctgagccacaaggcccaggaaactagaccaggaattaattgtctttggtcagttttaaatgaacaacttgctggttcattcctagaatagactgaacgtcggttacacataaagacaaaaggcttgacctcaggataagtcgaaggttaagaaaagaaatcattccatgaagcaaagaaaaaaaaatgcccgttgtcaactaactgatcagtacggctttcaataatggtgatgaacaagtaggtaaacaccacttccccttgtacaattggttatattgaagactactaactaggttactacatttcccccacactcactgtacagttaggtatttgtttttacattgatctatctactaggtgcaaagatttggtgagtggcattggctaaaatttaattgtagcctttttaaaaattacaatttcacattttaacagttactttccagcatttaagcaaatacagcaatatatagtggactaaaacaggcaggagtcagaaagagaaagccaatgttcagtgaacgtcgatgggactgagtgctgtggagggtgagtgagacatgcatagtgccagatgaggaagtgggaacaggggaggggggcgggaaagtatttttccacttggcctgcgtcaaggctcagatctggggctggatgagtggggagacgtctgccatctgtgtgtgtacatccctaaatgtgaactcatcagccatttcccaatggaaaaaaaaaaaaaaggtgcttaaagaaaacagctaagactctgccctcagaaaattcagtgaaaggcaggtccattttcagtaagaaaaaaacaaaatcagtcaattcagagaaaaatccacacggtctgattggtgttatgtatatcaggcaacagatttttctactctgattgttgcttttcatctggcagttgtggcagattgctatattttgcctgggaggctactggatttaggatctgggagtatcttgagggtagaaatcagaagtcttgtgtcctggctggacagtatagcatccagcatgcaaacacatgactttaagagcctgacgcagcctctgctcctagccagtgtcaaatcttgggcaggtcacagcacagcccaaggccttactctcttaagctgtaaaatggcaatatctttctgtgctccaagcagatggcctttcatatccaggagctaaagagaagggttcattctaggccaaacaagggaggtcaagtttgacactggcctctccctgagatccctttttttgttcctctcctgatgctcccttccactgtggggtgtcaagtccagtccttcagacgaggtagtggctttaccctcctaacttatctaggtgccagtgacttaactaggtccctccctttgggtgtatttaccttttcgcgggggaccagaggagagggcaccacttcatccaatgggctgaaatgttaatgatggaatccagggctcttattaggatggcaggaaaattccactgctcacttctgaaatgccattgggaggtttcaaaaagaagggctggagggctctgatctaagacttaccttactaatgataatcacaaacgcattgtattgattcagtgttttccagtgtacacagcttgctcactgatgtttgacctttattaccctattttatggagcagaacagtcaggctcaatgaggtggagtgacaaaccctaagtcagaaggctcctaagtgctcagggctgggactcagactctgggccttttgactccaaacttcagtggcctcgagagagaggaagcgtgggaacagtagggaaaagcccctgggtctcgcaggagagggtaagtaacagcggcccacagggcacacagatttgcccgtgtgccattatccagaaacagctcatctctggaagtgatcagaagaggaggtaaaatggaatcgaaggagagcgacccggaagggctttacttggccaagaggcaaaggcctggctgtcacacgtgaagatcatgcacccatttctatcaccacattttcatctacactaaatgttctggagggagtgggtgaagggggagggaagggaagctatgtcacttgtattaactcaactgacagtgtcctctaggacagaaagtgccaaggactgcccctccctggccccagtctgaactgggcgctcacggctcatgcgtttcatgcaagacggcaccagccacagtgcatcacagcctgatttaaaatgaaaacgatgtgactcaaagcctccttgcctgtttagttccaaatctgacacagtataattagtagaaccaggaaaagaaaaaattaaatagtttgaaaatgatataagttaaacctctatagttaccacagatttattcctacagcatttctaggttttggagtattccacaccactgtatttttatttttcccaaccacatgtaatactgtgctacgatggggcttaggttctcactatcccccgtctctacacacaaacacaaggatgtggtagtcaggggtcttctcgccaaccttctcccatgcctttgggagtacagttggcctttggcctccgggtggaagggcagggtctctggggtggacgggggtggggatttcctatgaagggttccccacctctgggagcagcctgcttgggggtactgcctgccccacccttccttgaggggcagactgttctggaaggccacgacttctggagacagtgggagtctgtttttgtttgtgtttttctgcaggttagtggtatattgcttcattcgcagttactatgggcctttaagttctcccagaaaagtccctgcaaatcccaccaaataactcggtgggagatgtttggtggcatggatctgaggtaaatctaagtttcataaaaagaaaaaggagatactatatacacttagtatgcgtgtgtccagatctagtatatgtatatagatgcataaatatatatatatatacacacacctacagacacgtacatacgtatacatgtgtatatatgcacacatcgatatacacacacatatacgtatgtagagagaatgtcgagagaggaagtttccagtgacgatatgcgggagaagccatgtggtattttgcctccatgttagggaatgctgtggttggggctgctggagctccagcactcctctggtcgtctgttgacacgcgagaggtccgtgggattcccatggctggacgtgagctgcagccagcgcccgggcctcagctctgcacagacacaccctcccagacggacctctgccctccaaggccagggtcactgggaagcacgtggaagccaccaaggccaccctgggccgtggtgagccacagcgggccacggcggcgcggcccatcctgcaggtcacatggtgcccgacttgtccgctgagctgttggggaacatcttctcggtgggcgtcacggccgggctgcccacgcccgagctgctgctgctgctggaccggtgctggaccaccggccgcacgggccgcatggggggcgggcggagctgggcgccagccaggcgggcggacagggctggcttgaaggtggtcatcatctcggtggaggagctgctgctgcggcgcatggcggcatcggggtcgcggatgacgatggtgtgaaggggactggcgggctccgagctgacggggcctggcgggttcttcaggggctccagggtgtccagcaccacatctggcgcctgcttgaccgtgttctgcctctcgagttcccgcaactcgtgcagagccgtgctcatggtcttctcgatgtcctggggacagagggagctggggtcagcacagtctggagacctggagtcaggtccttcctgtctgctaagcagcttcccttcgtaggcaggttccccagaagcctcgcggcagggatggagattaagtcctcaggatgtcttataaccacatgggagaaccaatgtggatatcccctgcatgctgccttgcacaggaaatagatttcataagggcaggtcagactactgataaagagggcaggctctggagtcagacagacacggattcaaatcctggctctgccacttccttgctatgtgaccttatgcaagttccctcatccctctgagcccccagaatcctcatttgtaaatggcagataattataatatggacctcagggagttgatgagtgcattaaatgatacagtccctgtgaagagcctggcctgacccctggcacagagtaagcactcaaaaatacgaatgacaatagcaatagcaataatagctaacactgagcaccaatccaaaccctgccccctaataattcatttaatcctcacacttctaaggtaggaactacctttatgctcatgtcacacaggaggaaactgaagctcagactggttaagtaacttgcccaaggtcacacagctaattagcagcatagcccaagtctgaacccagtcagttcagtatttttttaaaaatccttgctcacagaaaaatttcttggagattatgtatcagaatgttcacagcgcacatcccagaatagagggactgctactctcttctctgtattataatcagaaaatttttttaaaaagtggaaattttaacaggccagaaaaatcttcttctgcctacataattcccgaggatgttataatatctgagagctcatcaggaggagagcactctgattgagcactctgaaggactcagagagagcgagccccctgccacccagggcagcccgggctcaccatgccacagggcagcttccctcagctcccgtcccctcatgcccaaggtggtgctgtagctggaaggcagcatttaacccaagagccctgggacaggccacagggccccggacttttgagtaaaaagaatctgtggccagttgctggccgtgtgaccctgagcaaatctcaatcactctgcaccatattttgttcatctattacaatcccagacatttactgtgaatatggggtgagataatggatgtgatgaagctttgtaaactgccaggtggtggttttcaaaatccttctagcccaagagccccatgggttcccatgactgttgactgggatgcctccgcatccgacagacatgagaggacctgctcaggctcagctgagccacagcccagctggcttggccatcgagggcaccatgagggatactgcctaagccaccactggtaggtgccgtgcataacctcatggaggaatgatgactattaagacaggcttgctttattgcaaatcctaaaaaaaataaataaaaagtatgagtctggtgaaacagatggtggggttggagcctggagatgctggggccggcccctttctgcaccctggtcttttacattctctccctcccctgtctgcaggtggcttcctgcctgccctaggccacatggcaggcttcaatctggctggggtcagggcccagagctcttgctccccgcattgtcacagcctgtcctttttgttaggggactatggatgtctggctaatggctaatattagcttgtacgcttctccaggatgtttcatccgttgccccagaacaccggcaactttaagaaagggtgttttgtgccttatccaaaaggaggcgctgtgggggcaattttctgcaggaagggagggaaggcagacctctccccatctctgccatgtgccagccctgcagtgacacagccggctttcctggagccgagccgccctatcatcaaccactccgcttgaaggaagccccctattgacctcactactctctatttgctctagtccagcatgagctgcatggtgaaactttaacacataaaatgtaattactgcccctctaccaccatccccacccgccccaccactctaccccagcagagtaagcagaaagacaggaagttcagagaaagatcagctgagttgtttaggctgcagccttgcattagtccgagaggtggcgctgtgagtctccagagctgagcggcagagaggccctgggagacagagtggggaccgtgattgcttttcatctcctccccaattcgatcttcccactttggatggtcatgttgcaagttccccaaacagcctctttaagtgggttcacatctaaatcctaagggacattttgagaccaaagaaatttgggtcactcggcctactacctggggttcttcagctgccactcccctttgcagcctgcaaagtcaagggctcatcagagccaatgctgaggctggaaactctccagtggcagtgggttacttacatatcatttactacaattccctatttgacctctgttagtgaaagggggtcttggatggcagctgtcaaactagacagggtgcagatccatctgcaaactgagaacacatgcagcaggccccaagtgcattccaggggcaggtcgtgcaaaacgctccatgaataaaggtcacagaagtctgggatatggggcatgccctgttttctttcttggagattcacagtgcacatcttttaaagcagcagtccccaacctttttggcaccagggaccgtttacgtggaagacaatttttccacagatggggggtcaggaggatgctttcggatgaaactgctccacttcagatcaggcattagattctcctcaggagagcactacctagatccctcacatgcgcagttcacaacagggttcacggcctgtgaagatctaatgcccccgctgatctgacaggaggcagagctcacgcaataatgctggctcccgctgctcacctcctactgtgcagcctggttcctaacaggccacagatccatccatggcccgggggctgggggtgcctgctttaaaggttttataagtcttacagagaagccactcaactttgtcagagcagcattccccaaaccttgctgaccacagaacatgtattccctacccactccctagcatcctgtgggactaatctgctgtgagagctacttttagaaacagttttctagactgcatttgattctttataaatgtaaagggccctggggcaggcctcaggccatcctctatcataactggtagaactttctagactggtagagtttccagatgatggtgggtgctagggtgatgtttcctcaagtatgggggggaccagcagctggcatgcctcctcggaaggcactgatcttcagggacccctgggaatgggcatggggccaaactagagcctgctggtgtgaacaggagtactcattgctaggtgagctgtttctgtgttgtgtattccctgggaaccctgcctggcctcctctagaacacagctcatgactccctgcccttcttccttctccttttgaacagcgattcaaaggctactctccacagtaaaattctcacagaccagaaggttctgattgtctctgttaccttatgtgggagagaacactagggagagggtacataatgggcccccacaccaaattccagagacaaaaaaaatggaaacttctcaaaatatgatagaactgtcaaaaaacccatgaaaccggctatgcaaactgttaaacaaatcacagttctattcatttggcaaatgtaaaaatcatatagatttttcatccaaatacaaaacaaacaaacaaaagccaaccctctaagcacttgagaagaacctggaacattcttctcttgcagcttcggctatttagctctgcccaccctttgggtctcaggtcaagtcctctccagagaagtctctccctgcctaggtgcaatcctcacattttaggctctcaaaatactttggaccattccttaaaggcacccaaccaaacaactatttcacaactgtgtgtgtgtgtttgttgatgtctctttcttctctaaactgtaagctccatgtgggcagggcctgagtccattttagatctccattttactgttggtggctagcatggtgacggccacatgatagatgctcaatcaatatttgccagtgaatgaattgatgaatgaagagagaaatgaatgaatgagtgaatgaatgagtcaaaaactgaatcgtatcattttgtgtagtgacctgccattaccccagccccataatctggccaatgccctctccagccctggacactgggggtgttcagcctctatcggaaccctagcagtggctgctcccaaccagtctccactcccacgggaagcccagcaagggacggggaggccactcactctcctgttctctggcttagccatgagcctggcataaaggccaaggtggctccccgctccacggattcccacccgctgccctctggggcttttggctgcccagcctgccttcccgctggcccttacttctgccagggcctcggcctccagggacttgtggtcccctaggctgctgtgcctggtggaaccgcaggtcgacctcatcgagtgcccttcggagagcgccttcttgtcagggtagttgatgctgccagcgctcccgaacgtcgccatcctccgcttctcagggctctcgatcctcccccgggtgagggggattttgtgggggctgctggggcaggcagcagcccggggtggtgtgtctatgctggggcccaggccccggggcgggctgtgtgtgtcgcccccgcttcggcgtctggggatggctgctccatcagatcgtaaccgcactctgcaaaggagccagggggcgaggggcatggggcagaggtcaagcctggcaagtctcagaatgggtgagtcaaccccatgccacacactacacgctagtctaaggagcgggtacagtaaagcctcattcagccagaccctacaattccataatgaaagagctggctcagcacacagctcagcagcagggggaggtctaatctgtaaacatgaaagcatttggagcacggtgcttccaggccacagacagctgtgccgccaaccgcaaaatgcatctggtctacatgctaagtcaaggcctacaggattccaaccctggaaacgctttggtgatggttagttgggctcatgataccctctgaagcagttcagacttttccatgattctgaggggcttctaattggtctgaagctttgaggcttgactgtaccaaagttaccagcaccctgcaagcacagttggggtcccctgggaactgaagacactctaacgttgccacccaacccccaatctccccagaagagggctccttctgcgaggcttttttggatcttggaaaactagtcattcaagagtaaacactgcatggctggacagcccttttgtgcatttggtacctttcccacttcagggaggctctggtgtggtgaaaaggggattaggttgtgtttcaggaaggtgagttcttgccctgtgtctgccgcgtgctttcctgtgtcctctctcaagcccactttattaatctgtgaagcgggtttaagcaagatcctttgcccaccctttacctttgcttcaagtgggtttgaaagcaccttgaagataagaggttctatacacaggagatttggctgcatcctacagaggtcaccaagagtctgaagggctagaagtggtgaggggagagggagagggaccgtgtgttgggaatggattatgactagggaccaccagtgattcagatcctagtgccaccagccaagctaagcagtgcttgtgggtgccccagcaggaccaaagcataggtattggaaaggaagcagtacttagaaagaaagaacaagaacaaaggaggtgagggcgggggacaagggagaggaaaagagaggcagaagatatggtcctcctagaagtcaggggaccataacttctttgtctacctacgccagccttccacttccctgaccttctcaattccaccacagtgccccgagctatctgctgaactgaatggaatttgcagaaaagaggcatcaggatttttgctgaaataaattcataaattgtgtgttcccactgtgactgatttttttggggtctatctgcaaatacctacatgtgtgggctgaccacatgacccctccactggaaaaaacatagaatatgacattttgagagtgtgactaaaaaggcagtgagaaactgtcagcttttcttttcttttcttcttatttcctcattaattttttaaaaaataaccacatactttggattatacctgttctcagaaggacatgcacagctccttgcctggtagaaaggttatgtgacacagcctggcccacacatagggagcgaagaaattggtaatactgctccctccaaataagtgggtggagtcgagtgtcaatttccttcaacacatgagtaggtgtgagttttctgtttatgtagcgcgtttcagggaatatgtgagctttacatttttaaatataacaactcagttctacaacagaaagctggaaggaggtgcaggaactggacacaggtaggaaaaatacttgccaatttgtatctctctcacacattattattattttaaataaaaaagcactgggttcccaacacatgtctttcctcctcctcctccctgcaacacaggctggatggttctatacctggccttcttgggccaatgccagccagcccgcccagtgtgcccatttcattttgtggggaacaaggggctgcagtaggctccttctctcctctctgcccttgtgcttctcccaaatcagacatgaacaggattgacaccagcagggaaaaaatgaatccgcatatcctaccggcccatcacccccccaaagccgtaatccgagatgtgctccgtgggggactggaggtcgtttttggaagaggccttgtcatccagcaatggcccactgctggcctcgctgtcagccttctggctcaggctgtcggagaaggcatcatccctggggagaagacagacatgaattggaggcaccttcccccaaagaacccagcatatacagagctccctgatatgtgtctgaggggctgaattaacacaacttatggttactttgtgcccacagcgcttgctaggccactgcccactgggtgccttcccaccacgcatgcccattgcaacactcctggtcagtttccgcagctgggaccctcttctgtcccacacctacctcctccttttttctcttctagcttgttcattcccaggcagctccaggctaggacaagctaaatgctgcagggtgtgttggagaaatggggggatggagtccgcaggctgagcaccgagggctgagtgctgagtctctgtgtgacttcatgagaaatggcttctggctaagcaagggaggaagaagctgcctctgcccctcacctccccacccagggcttgggctactgtgaggtggctcccaagcttgttggggtgccctgccggcctccttccacggccctctgctgtggtgacttgtccctgatctcagaggtctggggacttcgggaggctgccaagggccctccactatggcattcctctggcagtctgcttggccctggccttttctctggctgagaccccctctctcccatcacaatgtgggctgttgatccccttcccttgaggctcagcttggtggctgcctctatggtaaatctgttctgccgagcctgaccagagctcccaaggaaggtgtgcactggaagcttccatggctttcaaaggaatggaaagtgcagactttttgtggtaggactaggcatttgggatgcagggctctttttcattaacccctgaaattattttttaaaaaatagtaccctattaatcagaaacaagggcatgtttctgcccatcccctaagagagctacctctggagtgtagaaccgtaggcaggggaggcctaggaggtggaggcacatggcaggatcccctggatactgagagccctggtgggtgatggcactccctgggggctgtcagctgcatcaggatgtaggccagaggcacccaacaccgtttctgtgtgctcagaaggaggaatttggatatccgttaagtggatcaccatttaaagggaagttagatattacccattgttagagaagaacaagcgtatgatatcaaggagagcaaattgctggcatacaagctagcactcccctacggtgcccatcccagacatcactaatctatttcggcattcttcacagaattctcgactccactcacatgtcctgtacaactatgtactgatgggggatgagtccatccacgccgttgtgccggccctcccaccagtcctccgaggcgcggtggtacaggagcagcgaggcccccttcttgaaggatagctcacgcggggaccgccccatgtagtcaaacttggcaatagcctcgatctgctccacttctggaaggaaatcaagggaaaaagcgtctctgaggtcagcaaagtggcagctcaggagcctcactcagatggccctggcttctctggggaaggatagactgcacagctggtgagaacatggacagaacgcctggtgggctggggctcaggaccctggggtcctagcctcagatccactctccaccctgcaacctcaggaaaaccatcaaaccctcaaaatgtaaagagggagctgatacatgctccttttccactgcccttcttgttctctactttttaatgctcattaagacaatattgtagaattttcgttttcttccaccccttaacacaagttctattaatatttctatttttctatgcacccttttcctctttgtcatttataatacttttagtaatttttaatcttttgagaggccacatcatgtatgcagactctaatctgcaaaatccgatacaggattttaagggtacccagacccttcaaagctcattgttaaggactgaactgtgtctgcctcaaatctatatgttgaagccctcacccacaacgtgactgtattttagaggctttaattaatgtaaatgaggtgattaaagttaaatgaggtcataatggtggggtcataatcctagtgctggtgtctttataagaggagcagaggctgggcgtggtagcttatgcctataagcccaacacttcgggaggctgaggcaggaggatcgcttgagtccaggagtttgagaccagcctgggcaatatagtgagacctcatttccaaaaaaaaatttttttttaattagctgggcgtggtagcacgtgcctgtggtgccagctactctagggcccgaggcaggaagatcacttgagcctgggaggttgaggctgcagtgagccatgatcatgccactgtactccagcttgggtgacagagcaagaccctgtctcaaaacaaacaaacaaaagttcttgtacaaaagggcatagcttagtacagatactcatgaggtattcggttgacagcagctgtcatgactgtgattataattattaatggatttggcctatgggatgcgtccagagaagagacgttgaactgcagagagtttaagtgttttaaactgcatggtttaaggaccatacaactagtgatatttggggaagagacgttttggggagcaggggattgtgcctacagtttattccacctgttttatagtttctaccctaagaagtgtccatatgtggtagaaaactgattttgtataggtattaatgttttaatattttaaagtaagcacaaagaggtttaacattataattcttacttttttttattttaatagaacagaagagtaacaaaagcaacccctgccctctctctagcctgtagatagcttctccatgctgagctttcttggggctctctatctgctccattcactgtggacaatctcgtcttcatcgatctattcatccacctgtccatcacacagttaagctcagaacatttggctttaccattttttagttgtgtgaccttgggatacttagtttttctttctgtgcctcagtttcctcatctgttaaatggaaatggtaataaatagaacctatcttacagggttattagaaggattaagtgagtgaatatacatgaagtgcttgcaacagtgtctggcacatagtaccctataagagttacacacatgttgttaccagaggctggtgcacttctaagggccacggatggcatggaaaaatcaaagagcaggaggaggaaactcccttgttcactccccatcactccccaccacacacatgcaccagggctcccctctggaagcaactggctcaagaagaccatgcttgtgtccccatgagatgcagtggctttgggatgtatttagctcttagtgactgaggcagccttctgcagggagcaggcctcaaacagtcaagtcagcttccccagctagctacccgacaaatgtctttaaatgctattctaacctgggtgttgggagagaaggaaggagggaaggaggtggggaaatgacagcaccactaaatgggtcagactaactcagatcttgactcagagtcacattctcagtaaaacaaacagagatcttggtccctctctctgcagcatctttgaatctcacatccggccgtgtgctggaactgcctgctagcccatctgcctgcctcgttacaagagtcagaaaggccggagggtttgcaagggcaggagctgagcccagacagctgcgtgctcctgggttcgcccagggacttcctctgacccagattccccaaactaagaaaggcgctgacctaagcagaggttttctgatactcagaggggcacagaggggctgcctccggtttctgcctttaccatcaccagagcctccagcagtcactggacagcagcctgaagttgaaagagtggggcagcagggggagcagacaatgtgagggaaagaaaacaggaggaacagggcgaacctccagctcagagaaagcacgtgtgtttgcagacgtcgttacataagtgtgtgtggtggaaacagtaataacagctcccattgattactaagtctgttatttgggcttctcgtgcctgaaacagaatatgtttctccccctcatcactctcccacactctgttacccaagcttacttcattccctcatcttccccatctcaggaaacagaactgctgtctacctgctcacccaggccaatgccctggcatggctctgcacacctcatccattagcgactccttcagagtgtcccctggatctgaccatggctcaccacctcccatgccaccctcttcacttccatacttgcttaggtagagccgcttctccccacagcagcctagagggtcctttacaatcatacaatcacatcatgaaactcccctgttcaaaatcctcagaaggcttcccatggaggctggaacaaaatcccagtgtcttcccactgctcataaggccctccaggatcccaatcgcagagacctctgagacctcatcttctctgtctctctctctccttcactagctcaatctgctcttgcctcactaagcttcttgatgtttttcctccaacatcctagtatgacattttttaaacacaaagtaaaattgaaagaatttcacagtgaacatgcatggaacacaactaaattccgctatgcacattttacgatgctagatttatcatatatctatccacccttctatccgtcttattttttaatgatttttaaattaagttataaacatcagtatactttatctctaaacacttcagcataaatattcatagaggtttttttttttctttttcttgagacagggtctcactctgtcacccaggctggagtgcagtggtgcaatcatgactcactgcaacttgaacctcctgaggatcaagcaattcttccacctcagcctcctgagtagctgggaccacaggcacatgccgccatgcccagctaattttttaagtttttgtagcaacgggggtctcactacagcctgggggaccaggctggtctcgaacttctggactcgagtgatcctcctgccttggcctcccaaagtgctgggattacaggcgtgagccaccacccccagctacagagccttcttgatgcttttaaaacagacaagtgtcttccctttacagggcctttgtacttcctattgcttctccctgggatgcctttctcccagatctttgcattcatccacactcaacaaatatgtattaatgctatgtgccgtttgctaatttcattcaggtctgtactcaaatgtcattgccttaccaaggcctttcccagccgctcccaactgcaagagccccaactgccaaatcactttctaacaccttctcttgctttatttctcttcatggcacttatcacaacctgaaatttatgtgtgtgtgtatgatgtgtgtatttatgtgtttgtggtatgggtgtgtgtgtatatatatactatatatatgtatatatacacacacatatacatacacatatgtgtatatatacacacatataattttgaaactttactatcaatctttcctaccaaagtgtgggtaccattaggacagagattttcttttctttcctactgtattctgactcctagaacagaccctaggacaaacaggcactcaatacatatttattgcttgcatgaacaaattaagcttttactggtaccaggtgttctacttacattatcacatttaatcccataacaacatttgaggcactaccctcatttcatagatgagggaactgaagctgggttgaatgatgggcctagggttgggtcacaccagtagatacagtgatgagctaacatctgagctcaggtcccagacatcattaatagaggcttctagatgtttttgaattgtgctaagcttattcctgccacaaggtctttgcatctgtacagtgtaaattgactatatagatatacaatgctctgtgtttgatgcaattcaactcctgtgtattgagaggctaattgtaccaggtaaaaaccctgtgggctctacagtgagggaagagatgaacagcccagcccctgagctacaggagaggttgagactgtctcagtaggggcctggctggagtcacattttaggaaaatcactccagtggcaaagcagagcagtggagggattggaggggagaggctggaggcagcagtggttcagagacggctacactggtgcggcctctgaactagcatgggctagacatgggcttttccggagatgaaaagacatgttgaagctttgcttttatttcagaatctgaaggttggacatttatgcttctctacccatcaaatccctccctctagccatgccattccagagaactctgttataggtcatgagtcctgcctgcatgaaagaggggatggctccattcctctcaataccacttatgtccctctgcctaccccaccccctacttcatccccagaagtgagaacactaatctcatgcaaccagtttactagaggccaagtcactgtatcaaaggctgagaatgtgggtgtaccttctcttctccgtcatcttccctgtgatgagagtaatgacagaagccagggcctgtttacagggtccctcttttctccccttctcactcatgaccttgggttctttctttgcattcggtggtggcaccagctgatattgagatttagatttaatttaaaaggaaaggagtgagaccgacttctgggatgacagcatgaagagctccccagggaaactcgagaaaaaatataaaaagaaaaagaaaaagaaatatttcaagcccctggaaatggtcctaagggcaaaaagcaaatgaagaaacatctattcaagaaaatctataaaaatttagtgagaaaggtgaaaatctctgttacttgaaccaagactgctccctccctctactcctgctccaagcttggggagatggaggctccaacccagatgactgcagtcaagcacacagggcttcctctccctttaccatcttctagtcacagggctttcttcctggaaggagcaggagctcagtgattctcatcctgctcccactacctgttgctgaggctaagtcccaggtgagtggagtggagagaccagggcttcattctttcacacaacccctactcatggaatggtggctgtactttgggcatggcaccactgaaaatgtgggggttctatcaaccttgccccagcttgtgaggtggtggttgcatggcaggagagggaagttaagaggatctctggctgcccctccacaaagcactcagtggggacatcactcagaagatgccattgtctccatccccagtctcagagtcctggctcagagattttcccatgggggagaaccatcccgtaaaacagacagatcctaatcttatcccaaaggaattgacttcagttgcaacagagcttggagaagttcaagtcgaaggggactctcaagaacagtggaggtcgtgttgaagggcaatccagtgatggttcatgaatttaacgaatatagaagctagactataacccagatagttagcagaggagaaccagggaataagacagccaggagaactcctgggatcagaacaaatatcaaacattgacttcagaaactatccctataatggggacagaatttgactgcattaatctgtagagcaatttaggaccaagggcactgctgaaagaatagcaatcatccagcaattagtagagattaacagccggaaaggatccgggaaagagacttctaccaaacccactggcatctcagggaaggagaaccctaccaaaaccactgtcatcccacagagcagtatttccatatgtcactgaaattaagctagtataaatagaagctcattcaaataagatgtatatggtaaaccttagagaaactgctaaaaaataactcaaaaatagtaagagcagaatactgcttgtcagaggctaggaaggaaggggaggggatatggggagcaattgctcaacaggtacaatgttagagttagttaggataaataagttctggtgttctattttacagtaggttgactatagttaacaataatgtattgtatgttccaaaatagctggaatagaggagatgttgaatgttcacaccacaaagaaacaatatatttacaacatgatgaatatactgcttacccggatctaatcattacacaacgtatgcatgtattgcaatatcacattgtatccaataaatatgtccaattatctgtccatcaaaaattaaataaaacttctaaaaataactcaaaaatatagtgaaaacatcattaaagaagtttaaatgctatattagaaaatatccactaaatgctatgttagaaaatatgcaaaagaaatcggtaaagaaggaatagaggaacaaaaaagatatgagacacacagaaaacaagaagtaaaatggcagacaaaaatccaactatataagtggtaatatcaaatgtgaatggattaaacaatccaattaaaatgcagagattaacagactggataaaataaaataatttaaaagacacactttagattcaaagatacaattagagtgaaagtgaaaggatggaaaaatgtattatacaaactggaaccacaggaaagctagaatgactatactaatatcgataaaatagactttaaaactaaaaatactgctagagataaatggcagcatttcataatgataaaaattttgatctatcaagataaaaacaattataaacaaaatgtacctaataaaagagcagcaaaatacatgaagcaaaaatggacaaaaacaaagaaagaaatagataattcaaaaataattgttagagacttcaataccccattctcaataacggaaagaacaactagacagaagatcaaagaggaaatagaagacttaaacaacactataaaccaactagacctaacaggcatgtatagaacacaccactcagcaagagactatacattctttctaactgcacatggaacgttctcttgggtatgccctatgctagtccataaaacaaacctcaataattcaaaatcatacaaataatacaaaatgtgttcttctaccacagtaggataaaattattgatttcttctatagaagaagtttcttctaaagtaggaatcaatagcaggaaaaaaactgggaaactgacaaataggcaaaaattatacagcatactgctaaataactagtggttgaagaaaaaaatcaaaagagaaatctttgagatgaatgaaaatgaagatacaacatatcaaaacttatgggatgcagctaaagcagtgcttagaaggaaatgtatgactgtaaatgcctatattagggaaaaaaacccaaacctcaaatcaataacctaaacttccaccttaagacactggaaaaaaaagtgcaaactaaacctagagctagcagaaggaaggaaataataaagattagagcagaaattaataaaatagagaacagaaaaacaatagagaaaatcatgaaaccaaaagctggttctttgaaaagatcaatgaaattgacaagccattagctaaataaaccaagaaaacatgagagaggattcaaatgattagaatcagatatgaaagaggggacgttactaccattattttacaggagaaaaaggatcataaagaagtactatgaacaattatatgccaacaagttggatatcttagatgaaattaataaattcctagaaagaaacaaactattgaaactgacttaagaagaaaaaaaaatgaatacacttataacaagagattgaatcaatcatcaaaaaactacccacaaataaatgcccaggcccagatggctacattgttgaattctaccaaacatttaaaaaagaattagtaataattccttataaagtcttccaaaaactagaagagaagggaacactgctcaactaatttcaccaggcaagtattaccctgataccaaaaccagacaaaggtatcacaagaaaactacagaccagtatttcttatgaatatggatacaaatatcctctacaaaatgccagcaaacccggccaggcacggtggctcatgcctgtaatctcagcactttgggaggcagagctgggcggataacttgaggtcaggagtttgagatcagcctgcaatatggcaaaatcctgtctctactgaaaatacaaaaaattagcctggtatggtatcgggcacctgtaatatcagttactctggaggctgaggcaggagaatcacttgaacccaggaggcagaggttgcagtgagccaagattgtgccactgcactacagcctgggtgacagagtgagattccatctcaaaacaaacaaacaaacaaacaaacaaaaaaatcactagcgagccaaatgcagtagcataaaaagaactatcctccatgcacaagtggaatttatcccaggactgccaaattggtttaacatctaaaaataattaatgtaatgcatcttatcagtaaaataaaaaacaaaaatcacacaatcatcttaatagatgaagaaaaagcactgacaaaatctaatatcctttcaagataaaacactcaacaaactaggaatagaagggaacttcctcaacctgacaaatggcatctatgaaaaacccacagctaacatcatacgtaacagtgaaatactggatgctttccccataagatcaggacttagacaaggatgttcactctcattacttcagtgttgtactgaagattctagatgggccaattgggcaagaaaaagaaataaaaggtatccaaactggaaaagaagtaaaaatatatctattcatagacaatataatcttatatattaaaaaaataaggaaatcactaaaaactatttgactgcatgaataagttcagcaaggttgcaggatacaagagcagtatagtaaaatcaattatatttccatacactcataatgaacaattcaaaagtgaaattaaggaaacaatttcacttacattagcataaaaagaataaaatacagaggaataaagcactgacaaaatctaatatcctttcaagacaaaaggataaaaggcactctgtagttgccactctggcaactacaaatcattgttgaaaaaaattaaagatctaaataattggcaaaacatcctgtgtttatggatcagaagacttaacactactaagagggtgatatttccaactgacctatagatttaatgcaatccctatcagaatcctgcctaacttctttgtagaaattgacaagctgattctaaaattcatatgtaatcacaagaaacccagaatagccaaaacaatcttgaaaacgaaggacaaagttggaggacttaaacatcccaatttcaaagcttactacaaagcaacagtaatgaagacagtatagtaccaacacagagatagacatattggtcagtggaatagcattgcaagttcaaaaataaacccatacacctgtagtcaaaggactttttttaacaagggtgctaagaccattcaatgtggaaaagaataattttgttcaactaatcgtgctgggacaactggagagccacatacaaaggaataaagtttgaccattaccttatgccaaaattaactcaaaatagatcaaagatctaaatgtaagacctaaaactctaaaactcttaaaagaaaatacaggaatacatcctcatgaacttggattcggcaaaggcctcttagatataacaccaaaagcatgcgcaacaaaagaaaaaatagatgaatggaactcagtcaaaatgaaatacttttgtgcttcaaagggtatcaccaataaaaaggcaagccacagaatgggagaaaatatttggaaattgtatatctgataagggacttagatctagaatatataaagagctgttatgatctagaatacataaagagctgttacaactcaataataaaaacacaaataaccaaatttaaaaatgggcaaaggatctgaagaaaaatatacaagtgaccaaaaagcacatgaaaagatgatgaacattatcagtcatcagagaaattcaaatccaaacctcaataagatgcaacttcacatccactaggatggcaagaatcaaaaagtcagatagtaacaagtgctagcaaggatatggataaattggaatcctcatacactgatgatgatattgcaaaatggtgcggtcattttggaaaacagtctggcagttccttaaatgactgacatagagttagcatatgacccagcaattccactcctgggtatatactcaagagaaatgaaaaattctgtctatacaaaaacttgcacacacatgtttgcagcagtattatatcatagctgaaaagtagaaacaacccaaatgtccatcaattgacaaatggataaacaaagtctggcattttcatgtgatggaatattattcagccatcaaaaattaagtactaattcatgctacagcatggctgaacctagaaaactgtgctaagagaaaggccacatgttatataattccatttatataaaatgtccagaatagacaaatccatagagacagtgggtagacttacagttgcattgactagggctgggagaaatgtggggggtagggatgggagggcgtaaggagtgatagctaaagggtacagggcttcttttcaagatgatgaaaatgttctcaaattgaccatggtgatggttgcacatatctgtgaatacacaaaaaaatcactcagctgaacactttaaaagggtaaattgtgtggtgtgtgatctataactcaataaagtggttttaagaagaaggcagggtccttcgtaggtataaggcctgagccaaatgccgcaagccagtttaccatgtttattactagggattaggagcatacaccaagtataagaaattggccactgttctttttttctattgttcttaatttcttatgaaaaggagtgggctgggcgtggtgtctcacacctgtaatcccagcactttgggaggctgaggcaagcagatcacgaggtcaggagattgagacctgcctggccaacatggtgaaaccccgtctctactaaaaaatacaaaaattagccgggcatggtggtacatgcctctaatcccagctactccggaggctgaggcaggagaatcgcttgaaccagggagtcggaggctgcagtgagccgagatcacaccactttactacagcctggcaacagagcgagactctgtctcaaaaaaaaaaaaaaaagaaaagaaaaggagtggctatgactccacaactggggtgtttgtgcataaatcaactaatgtcattttaataccatcaaaaacctcaccttaatacacaacgacatggatgaatctcagaatattatgcagagtgaaagaggacagagccaaacaactgtattctgtacaataccatttatatgaaattgtaaacagaccaacagggggaggagtcaaaggtaacctcaaaaatttcaggaaaatatcagtaagagaatggtggcacaattataattgaaaatggacatatcacccatatgaacatgcctctgtcactgattttagtggttttataatctaataatcttgtttctcatttagcttccaattaataaagttgttagtgacaggctgccttcattttttcatttagtcaaggatccttggcctaaccatggtttctttatataactcttggagaccaaagagcaagcactatggaatttccagacttatcagactcaagacaggagactaggcatcagttgggtatagaatcttttttttttttttttttttttttgagacaggaccttgttctgtcactcaggctggagtacagtggcacaatcatggctcactgcagcctcaacctccctgggcttaagtaattctcccacttcagcctcctgagttgctgggaccacaggcatatgccaccatgcctggctaatttttgtattttggttttttttgtagagacggagtttcaccatgttgcccaggctggtctcgaattcctgggctcaagtgatctgcccacctcaacttcccaaagtgttggggttacaggtgtgagccaccacgcccagttggtacagaatctttgagacaagaaaggcaacagatacacaaacaactaaattgttcctgcaatttggcattcattggctgattcatgcatggcaaagacctggactcatggttctctgcctgatttgacctttgaggcctgctggattccattcataccgggtgctgtcaagagcaaagaagacagatattgatgatcccctaaatgaaatgtctaagaggaaacaggtaaacaaatcaggaggttctggttgccaatgaccagtaactgccaatgccagttaggtcaagaaaattctccaggactcagtttttctatcaggattaggaaggatgtctgtttgatacagagtccattgatgtttcttatccacctccctgtcccaggcactgtgctaggctccttcacatatgtcacctcattttaacccatgccataatttgcttggtgctgtcattcccattttatagataaggaaatagaggccagaggtgatgtggcttgcctcagattacatgaccataaggactccctctgtgcttcaactccaggtctcttttttctgagcacagtgaccccttgactgtctctgcagctcactattctgccactgtttggccagggatggcaagaatgtaacatttagaaaatgcaattgattttccaccaaagagtgcccctgattcaataccccccactaatacacacaggatactttgagagccttcagggaacatgaaactggctctcccagactgtggcttcttccttcccagaatgatttttcctgcctttgtcattcccagaaaccagcagccttacaaagaacaaaaagaagaaggatcatctcggagggggacccaaagctctgactcatgcattctgggggccactgtgaacctttaccctgagaagtgggaggcagcactttctggggggtggttcttatggggaggaagccccactgggtgagtcccatggctgcttcttcgctgacccagcaagccctattctctctgtccctcctcatcttcagtcctggtgtccagagaagccttctgcccatcagcccgaggagctgtggaaaaaccagcaaagggactgacagggacctcagcccccaggaaggcaggtgcttcggtcaagacaaaggagaggaaatgacaggagtaggagagagagagagagagagagcaagctacagggagagataaagagatggacagaaggagatccagaaataaaaagagcaacagatggagaggacagggtgagggctgttaaaagggatagagggaggggagaactggaggtggtcggcagaagaaaaaaaggaggaaagagaaaagcaaatcaccaggaataagcagaaggtggcggccttcacatctccaaacaaagcctctgcaggacacattcctcagttcaggatgactttagcctctcaggagtctgatcaagctgaacgtgacatctggatttgcttttctgttcctgtgacccgggtctgacccattagctccctctcaggccatggggactggatcatgactgggtgcatgactcaaggcagtccaatgagactccaccccaggacctctcttggaaccattatagaaaggaagcccttttccactgagagtttgggtaagatgatggtgaaagcctggaattgccagagaccactgcaccggaagatcctacacgagaatgaaaccagcacagagggaagcagaacaagaagacagagacaaagtgctgacaaaaatcacccttgctcctggatccagctgtgcctgaagccatcccaaccctgggacttttcaggtataggaacttactctctcttaagcttaagttgatttgagttgggggttctgtcattagcaactgaaatagtcctactagaatgtgaaaacccatctgtcagtcttgtctcttttaccagttcccagaactgtcacctgaatgcctgccctgctctcctgacaaatgtggtggccaacgtgtcctggtcccacaaaagaaacacaaaggacaagtaagagaactgctaagccatgatgtttaaaaaggaaaactatcccaggtgcttggtgcatcctgggccgtattctaactttcaagggtcctaggcccttttgcctgcatgggtcccttcctccattcaaaaaaaaagttaaaaattatattttacaactgcattagtataaagacaaatataatccagactggatattgtgttcattttttttctgattttaaaagaaattaaaacattttagtggacctctacaagtaccatgggcccttggcactatgcctactctgcctgacggataagttggcatatggttcagattgcttgtctacacagtccagtttccctagagactagtccgactctcttctccttgtctggaaggggtggaggaatctggagaaaggtcttgactggcctttctctctctctctctcaccacacatttcccaggatcatcaccctttgatttcatctccagggtgcccaatgcaccagacacacctgtaatctggcattatcgctttgcaccatgagaagctacttccaacctgtcaagatctggtgacagactgggagttcctcaaggaccgacgtcttgttcatccctgtgcccaagtcccagcacaggcttggcacagagcagaccctcaaaggggaaggatggaggaacagagcttgctttctacttagggaactcatgtctcttaggatttgtacctgggccaggcaggacacattaaggaatgaagtgggctaggtgtggggtgtcgtgaacacagcgtgagcctatgaggatctgctctgtgtcaggcccatgccaggacttggggcatgccatgaaggtttttcggggtcttcgtctattctgaaggacagatggctgacttggaaagctgaagaggtctatgtgggccagccctgtggttgggctgacaaaagtcagtgtgagaggccccaggaagaatcccttgtccccaggatccccctcactcaccttcatcgctggtatgaggctcagtgccattgtcatggtcaacttcatcgatggcccctggctcgctgtgtgggctgtcactgcaaggaaacacgggaatgggactcactgcggggggttatctaccctcacagcaccttcagcctctcatgccagtccagttggcctctgggccctcccgcagctcagatgcaggcctataccatcctatcttttccatgtgaccactccggggaccttcctaatcagaaaactactcccagcctcctccttgcgaagcttcccaaatatctcccccagtgccctcctagccctggaatttgctgagctgtcttcttggtgaagtctgtcaatgcttacgtgttctgtaagatccagagggcagtggtaaaaccccagcatttataatcagaaggaccacaggccagaacaaaaagaaccctttgaagtaccatgagttatttcatctggcctgactctcttgtcttatagctgaggtgacatatcccaggaggtaagatgaagctaacaagggctgccctgtctttctgcatgcaaaagccccgactgatgcaggcactgagagtagactggcaaccatgatgggcatagtggctgagtaatccagtccatcagatttaattgttaatgtgctggtataatttcaccagctactaccccctcactagattataagcttcttgaggcaagggttaattcacataatcagccagttttttttttatagagccattgagtgagttctaatatgccaggcagtgtgctggtaggagggatgcaatgatagataaggcggacaaggttcctggcttcatgttgcttacattgtagggagagggacaagaaaaaaaaccgaagtaaataggccattaaataagacagttgcaagttatgttatgtagtgttatgcaggaaataaatgggcagagacaagaagagcagaggggacctataaagagtggacagagaaggcttctcaaaggagttgacatttgcaatgccatttaaaggaatatgcattttattacgaaaaattctccactgtcacctgaatcaggaccaaactcaatggcttccaagatttttcacagcctggctctacccaacctgtggagcctcatccttcaccattcccctgtcacacatgctatgctctgaccacactgaactgcttttcattctactgaatgctccaggtcttcccactcctcactgggttggctcctgttcattctgcagtctcagctcagtctgcacttcccccaggaagcccttcctgatttccctagatcggctcagggagccccacttctggagccatttgtttcctgttccatcagagctcctgcaccaggggtcaaccttgtttggttacatctctgactcccagcacagaatccagcccacaacagatgattggtaaccatttgttgaatgaatgaatgttgtctactgtgctgagaccctcagccaagtctccttttttggttttgaagactccaaaattaccatgtaattaatagttttacagtctcgtgggaaacaaataggattaagaaaagtgtggttattgtatattgttctttgataagtacacgaagatctgtgggtcccttcccagaacactaattacatatattgcagcaagaaaagagaactggtaatggttgcaaaaactgtgtgaaaattctctttgtccagaaattatgcttgccagctgtttaatgtttctgttacagaacagggatggacttgctccctagtgcctcaaacgagattagagagctgtgatcagacaccactatgacccagtatttctatgcagggaggcatgtgggaaggaaacacaaaggctggaacaccttccttctttgaagcagctgcccaaatatgctcacagtactaaggcaattcaaaagtccaggaatgctttgacaatcaaaaaacaaactcccctgtaggcacctggctgaaggcagtgtgggtaatacctaaatatatagctgtgtgctctcctgaattggaaataaagaaatagtagaaatgctttggtctctgtcattgagtgtcctgaatttcctgtcttcaccacatttaaagatttttttcctgtcttcacattttaaggtcttagcctggggaagcttttaaagccctgactttgaaaaggttctaaaatctttctcctaagacctagtgtagtaccaggtataccaggcacacagaggtcccaaactagtgattgttgacatggtgttggacacgcaaagaaactgagctcactttgtctggaaaagagaactcctaggtgagaggagacaagggtaggaagtgtcacagtcagttcatgaagttgaggtggggactagtcactcccctgcttcctgagatgggcttgtgactcacatggccagttaaagcattgcatctccttaccaaggtgattacttcaccaggcccaaacctcagcaatgaaacacaattcttgagcttgtgttggaacatttgggaaggaaagggtctttttctattgaagatgctaagagagtgagttacagatcttgagttgctggttgcctgcttgcgaccaccaaggaaatggctatccaagaatgaagccaacacagaatcaagcagggccaaggaatggagactgcaggaccaagtccttgtggtaatagttgagcccctggatcaagctatacctgaagatatatccccagactttttacttaagtaaatcaataaagtcccatttggttaaaggccatttgagttgtatgtctgtcccttgtaaccaagagaatcctaactgatgtacctatctctcatgtgaagctgctgtgaagctcagatgagaaaatgtatatggaagcaccgactatcaagcagtaagaaaactgaagggtttcttattgttcctattcaatggcaataacaatgacgatgataataatattaagaggaatggcatcttaccaatattcttcccctccagccatgcatttttcatacacaggtccctctagctcccgggggctggggaagatggcttcatgatggatgatgatggttttgatgacttcattgatgtgtgcctggcaggacacagggtcctgcccatcagggatgtgcatgagggtaggcccgaagcagatggccaggttgtagggatccatcatgttctcgtcgctatactgggagaggctaggagagaggagttacccacaagtcatctgggaaaggcaagtcctccccctgtgttttttttcttttgggggaccctattcaaatccaggagggttccatgttctcctttaaaaacagcatctgcaaaagcctcaagataccccctcccaaaagaggccaggcctgagtcaaaaaggggccccttggccagacactcactggttgaggaaagcgaagaggtatctcatgaccacaatgaccacgcggggaagggtgacgaggatttgttggatctggtgcaccctctcggctgggttctccagttctgtaacataaaggggcctttcagcgtgcctttcatcctcagagagcaaagcaacaaacattcgctcgccacatctcctatatcaacccacgtggatgggggagccagctctactcttgattccagggatcacaggtgatcctggcctggccaatcagagcatccatctccctagctacagggaggggctggaggtgtggcctaatcaagaaccaatcagagtcgactctccggacttggttgtgagaaacccacagggagatgccctcttggacctgggtagagggaagcctggagcacagtgggggcccctgagaggaggatcccacctaagagtgaagctggcatagagccggacggggcatatatctgctgatgccgtgtgaaggtctgagtccagctggacctaagttttccaggttcccgaacagtgcattcccttttatgaagtaagcaggtttaagctgggtttctgttacttatgagtcctgacagacacaggcagggacgatgttttattaaactctttacaaacaccagctgcagcacaggcctgacacatagtggttgctcaggaaatgaacatcgaataaatcaccacttctcaagctacctatcagccaaagtctggcagatgcttgggatctcatctctgacccctgtttccaggtcatcctagacctgaaattggctcagggccctgtacaggaacaggatttttggggttctggaaacactggctgagcaagtgatacagggctcagacagggtcagacctctgcagtctagaatacagcttgtagtatggaggtctggaaagatgagcagggaatagtgtggagggaagagaggaacagaagggtcttttacacacacaataaaaaagagctcaaacctccctcttctcttgccatctcctgggacactttcctggctgcaaatatctctcagagtactgtgagaaacaccccaaatgaaactgggtatggggcaacttttctgtgaatcaaatttaaaagtttattctaaatgactaaaattctaatattctaaagttgaaagcttattttttaaaaaaatttccaaaaggttaccttggatttgggtacctcagagtcagggtgccatgacatcagctccctagactgggttcctcctgattttatccacagaaacataatagtttctcacaactaactagcaatgtcagagaaaaatccccagacaacttactttcagcatttcccttgctggtcatgctgctgacctgacctctagaccttccacgtctccccatcacccaaggggaaaagctctggaatgtctgcaaggcattcaaggtcttcccccttttgctccattttccccttccaacctcttgcaccatgcacaggctgggacaccctcttggctggtcccactgggtctatgtcccttgcgcttcccaggatcccccgtgctcattcctcctggaacactctgctcccagcactctctcttggctctgatctgcgaaaccaagtcttcctctggttctcctctgagctccttctctacccagggggtgtgacatgcccattagccctttcattataaaccatcttgttatttccgctttcagttctacgaggatgcacgtcacacttcgcctttcataatgtccctcctctatgcctagcacagcagtaagcctgtagctcaactccaacaatgatttgtcaaaaaactgatcatttcacctgggaaatacttactaatagtagatatcaaatcttgaaacctttccttaggaaagagtgggttttccagtcctcggaaatacagttttaaaacaccagcgactgaattgatatctcgttcattttgatcgtccacaagggggtcttcacctgagtggaaacaagagacgagatgatatttcagcttgggaaggagtcagagaacgtgcagatggccgaagagatgacctggtccagcctgaaccacaggaaaggcagatgggaaaagtctcccccacatatgaggccccccacttcagcaagtttaaagttctccctgcaacttatttgaaaatgtttaaatctatagaaaagttgtaaaaataaaataatgaacgcccatcacccttcgcttacaactcatcttgccacatttgatttctcgctctttctgtatttatatttattgttgctccactatttgagattattttgtagacatcaaaacacaccaccgctaactacttcaacacacttctcctaagaataaggatattcttgtatgtaaccacaacattattacacctaagaaaattaaccattcaaaaagaacatctcatatacagcccacattcagacatccccagttgtcccatggtgtcttttatagactttttttcaaaagccaagatctaatcaacattcacacaattcatttggtggttatttttcttgagtcctttaaatgtaaaatatgccccgatatttttgtttgctagtttgttttttacaatctcggctctttctgaagagccctggccagttgtcttgtagaatgcctcacactctggatttgtctgttttctcatgattagactccaattaaatatttttggcaagaacactacatgggtgatgttatggacaccttaatgcatcccattagaaggcacgtacgtcaggctgtcctgctgctggtgatgccaaccttgatcactgggtcaaggtgttggcctccagatctctacattataaaggtattttccccctactttgtaataagtatgatctgtgaaatgatactcgaagtgtcaagatgatactctgagacgaccgtgtgcatgtagtgcccaacatgtttcacccaatggttttagcatccagtgatgatttttgcccaaattaattgttccactggggttgcaaaacggtgactttctaattatgtcatttcttctctgtgtatcagcaggcattcttttgtaaagaagagctgtcttcctgtcccccactctcaccctttattaacatttatacgaacttgtttttgtaatttttaactgaattgtgattacccattaccatcactattttttagaatacttaaattgtcccaaatttggccagggagcatactttcttgtgtccttttaatgtgacctccattgagcacttccttgttttctggaccaaaaaaaatccccaattactttttactttccttgatccagatcttgaatcaaacatttctccagcgggctctgtttgctttttgtaggaaacaaatatggtgtctcatatcgagacaccaagatctaggtattaggtgtgctcattgctacagaagagtcataaagaccttccagatcctttcagtggatagaactagaattttttttcatgagttcatactgatgtttcttattcatacaataaggttttcattaccttcacttattttgtatttgtacatttttttcttaccataaaaatattggttctgaataatattagtaataattacattcatctgctttatcctataatacacaatcaatggtgtaacagttttaatagcaatattaccactaacaataaacctgctacacacaacttgagatttctttccagggcttttgtttatgttattgtttagtatttttatcttcaaaatgtatcccactcaagagatatatggtcagaagacagaaagtagatcagtggttgcctagggctggtggccagggtatggaggatattgggagggacttgcaaatgggtacaagattccttttggggaggatgaaaaagttctgaagtaacgttatgatgatgattgcctaactctgtaaatataatagaaaccattgaaatgcattttttcttttactgatatataacattttaaatatttatggtgtacatgtaactgttagatgcatagaatgtataatgatcaagtcagggtatttgaggtatccatcaccttgaatatctgtcatttctatgtgttggtatcatttcaagtcctctcttctagttactttgaaatatacgaaatagtgttgctaagtatcgtcaccctattctactaccaaaccctagaacttatttcttctatctaattctatgtctgtacccactaaccaacctcttttcattctccactcccactcacccttccttctggcacctatcactctatcctctgtgtccatgagataaagtgttctagttcccacacaggagtgagaacattcagaaatcttctttctgaggctggcttatttcacttaacataatgtcctccagttccatacatgttgctgcaaatgacatgatttcattcttctttatggctggatagtattctactatatattatacactacattttctttttccattcatgcattggtggccacgtaggttgcttccgtatctttgctattgtgaatagtgctgcagtaaacgtgggagtgcaggtatccttttgatacattaatttattctcctctagataaatacccagtagtgggattgctgaatggtatggtagttctatttttagttttttgagaaatctccatgctgttttccatagtggctgtattaatttacattcccacccacagtatataagagttcccttttccctgcatcctcgtcagcatctgttattgtctgcctttttaataatagccattctaactggggtgacatgatatttgtggttttgatttgcatgaaatgtatacttcaaaaaatgggtgaaccttatggtgtgcaactcaataaagctgctaaaaatgtatgatcggagtacatgttcaaaagttactctctgtagttatcaatttggtaagtggcacacttggttttcttcgtattttaggtagtaattttttttagaaatactttttttaaatttacagttttgaatgcacaaagcatttatagggtccaaaagtcaaaagttgcactcagaaaagccctactcttatccttctctcctccacaccttttaaccattttcattcgtttctggtttgtcttgctgtgtgagcaaatacataggcctatttttaatatcttcttatttcttacacagaatgtagtatacttctaaataaacttctttcttcacttaacaagaaatcctggaaatccctccacattagttcacagagatcttcctctatttattatttttttaaaggctgcaaagtactctacttcatggacagaccgtaatttatacaatcaatctcttaggggtcaacatttgacttctttccactattttgttattataaatattgccacagtgaatagtcttgtgtttttgtatgcacagaggcagatttctgtgatcagttcccagaagagggatggctgggtcatagggtagacatatatgcagttttttcagacatagtcgaattcttcactggggctatgccattttatattcctaccagcaacaccatctcaagaatgttgttttccacagccctgcccctggcatatcatcagtgttttgaatttttgccagttggacaagggaaaatgttatctcaggggagtagcacttttcaatttaatcagagctgctgggcaggttcaccactgtgaatttccatgggggaggtgaaaggcagcagcgagccttctgctgttttgatgttcagagacatccacacaatgggctgctcctcctcctgaacagcgaagagcacctctagagctggcaagcaatgaaaagcagaactggaaactcatccttggatctttttactctgcttctgtggaaagtgaatacatgtcactgccagagcctccctagccccaacatgcttcagtatgaattagagaacggtccccctgccttcctgcaccaaggcttgcagtgtacagagcatgagccagagttcagttcccatctgttctcttggctgggcagccttgtgcagtgcccagagtgaacaatcatgcatggtggcccagacacaggtatcaaataggtcaatctctcaaatgttcccactggaggacgtgagaatgctgcctccataagacttctttgtagggaaggaagagagaaaataaacacaccaaaaaaatcacctgtattcacacagcacttctcaagtgagaagcacatttgtacatacgaactctcctaacccttacaacagcattgcatgtcactaagggagacatggttccaataccaccattctctcctgtgagagagctgaggccctggcagatgaagcagtgtgcccataatcacaaagtcaacaacagatactggcagctccaaggtctcataatccctgagagatacactttcttctacctgtgattttttgatctgtctgtctgcatctatgcctgcttatgtaggtaggtatatatttacctactttccttccttccttcctttcatcctttacagtagaatctcaaccttttttttttctcagtaaaaaattcctgtgaaatcccaacttatagaacaaggctgtcttagttgaactggggtgggggatgtccaagccttacctcctcagcctccctctctatccctgtagcagcctaaggaattcaaaaactgtaccatattaagctgtttccctattagctccacacatcattcctgtggtctcataattcaaaaacacatggatattttcctccatgttgcctagtactagttcccgttgttaagcatgattcgcatattgactttacatacgcacacatacacatacacacgccattagttcttgccattcctcctgcaaggctctcagtccataaattgaactgcccaaacattcttttcaattagcccaggcctttggctctctgcaagctagtcagttttggctctgagaatggaatcccagagctggagacgagctggatggttcctgtgaatgacggctttctccaggaggagaattagagctaaaattccaggcaaatctgaaggaaagacatgttcacacttagctagctaatgtcctggggaggtggcattgttactgaattgccctgcctggagcttacttttacccagatcacctgggcgttgccaaaggctttaagacagggctgtgcccagggcagagactgagcacacagtgtgtgcttaaaggctctgtcagacctgctgctggaagcttggagtcagtctctctcatgagggcagttctctctggccacaggtcctcgagcccctcgacatgacaaccccgcccagcatctccaggttccatccctcttcttgaggcaggacacaggtctcagaaggggcagatccagagtcaagagtgtgctagagcctacgtggcatggctttagccccacatccaaaccctgcgtagatatgcacagcgggagagagccattgcctccttggcaaggcaccccctccacataaggagagacctcagcactcccatctgtgcatacaaagagggcacctagagaggtttgtgggggaccctctgggagacaagagcaaaccacagctcagtagctaattcttgccttttcatgatgtgtttttttttctctctctccttcattttgccagaagatttatagggagagctcaaaacttgagcagtgagtttaagatttactgacgacaacaacaaaaagaattccaactaaaactctggttgactcatatgagaaggaaaaaaaaaagtagatttaggaataataagccaggagtggatttccaacatgttatcacttttcaggagctcaaggaaaagaaaaccatgctcctttcaacagccttaagcaaggaactctgggaagacctctactcaggagaagggaaaaacagagccaaggaagaacaagacccaaatcccttttaacaactggtgaagaatgggcaccctgcaggaattagaggatttaaattttaaaaataaaaggaaaaggctgggggcagtggctcacgcctggaatcccagcaattctggaggttgaggcgggtgcgtcgctttgagcccaggagttcaatggcgaaagcccatctctacagaaaacacaaaaattatccaggcatgatggcacacacctgtaatcccagctacttggtggatggaagggtgctgaagtgggaggatcacctgaaccggaggaggcagagaccctgtctcaaaaactaaataaactggccaggcgcagtggctcacgcctataatcccagcactttcggaggctgaggtgggtggatcacgaggtcaggagatggagaccatcctggccaacatggtgaaaccctgtctctaccaaaaatgtaaaaaattagccgggcaaggtggcacacgcctgtagtcccagctactcaggaggctgaggcaggagaatcacttgaacctgggaggcggaggttgcagtgagccgagattccgccaccgcactccagcctggtgacagagcgagactccatcccaactaactaactaaataaataaataaaatacaggaagaaaggaaaaacatggcatactggtttggagaggaaatttagtcacgagttaaaccatgtgggatgtgaagagtgggcgagaagagaaatattgagctgggcccagatttgggccaccccgtcgccagggaaacacagagataagcaggctgacggccaggaagagggaagaccttagtctggggaggggtgggaggaagcggccctgagtgtcagccaggttaggagccaaacccagggcatatgcttggtgaatatcaaggaacagaaaagagtaagtgagaaatctggcagcggccaacccagaaaatccaggaaaggatttttataaaagagacatactagaacgattctttcagaagaaagcatgctccattgtcaactcaggtggagcagaaggaccaggctggcgagagaatgagattcgttttggaacgatgggaagagggagtgaggccaactgcatccgtgaggaaaagaaaaaggaaaaaatattttttgcagctgagatttagttcagacattctctgcccagctgggctctgcctgaggcaacccaaggcttgttaggagcagagaattcttttaaattgcacatcacccctgcaaagcaccaaagcaagtgacaggaggtgctgaccttagaaaatcacattcaagaaggtaaaaagcagtgctaccagagtagggaaagggtggggttgcccgtggcaacaaggttacatacagaatatggagaggcagggaaatgccaggcaaagtggttgccaggctggaggcaccatgcagtgagtttgcccacgagattcaaggcagggtgacaaggcattctgtataatgggatgagcccaggaggaggcaaccagcaaaggttccagactatggttctgttcattgtaaatgaagacaaggcagcagggatgtaaggagctggggaaaatgaagaaacaacattatgggttggactgtccagtgctgccaagagaggctcagagcaatgacaaatgatacttgcatcatggacgcagatgggagagacctcttgctttctgacctttgcacatgctgttctcttggcttggaatgccctttctttgcccctgtttcccctggctcttactcttcaagcctcagcttaggcattttttcccaaggaaaccttccctggctttgctgttcctccccactccatccaggctgggctagggcctcctatgctccccaatgcctactctatcattgcactgattatactggctgttgactaaactggctcccccactagtagtgactgtgttttgttcatattgcatttccaggcccttgtccattaccttgtatggtatagggctcagtgcatgcttgtttagtgaatgaatacatgactaagtaggagcttggagcaaggaggtcctggggctccctggttctaagcacccgagatccttgaggaggctccagaaacgaagctcccctagaccccagaaggccactgagcatgacatgcagccaaatctcattgtctacagatggttccaagccagagcacctacatccacagagggtctgtgcctgggggccgtggcagtactgcttggggctgcagaatgcttcctccaccgcaggatggaatggagatgaccgagaggcagagaatttgctcaagaggcagctcctttggggtggtaggggagctaggtaataagtaggaagaattctatgggtggaaacacacagagaggtctgctcagagtacagccaacaggggtaaaccataccttttgggatgttatgtactgcaagtaaaggggtatggggttggggtcttcagcaccagaaccactcagagaagaaggcagtaaatcagagttgagaaggcatggactatggagacatgaccttttcaaatattggaaaactgcaggcagagatattatttgggatactgatattccaactcttctttcctcccctgggatgaggttatggtcttgttaatgctaggttttgttctagaatcagggagcaggattgaaaatatttcctcgaatgaaactgcatggattttccatttcagtgcagcagtgagataagcactgaatattcaaaagcagaggtgtaagaaaaattgagtgtttcctgacccagtgagtccttacttggcttggacactgtcactggccatctgttcctatcagggattctgaggcccagagaggctacaccaaatgtatcatatgtgtcctggtctagtggtccacctcatttctaataagctttcatatccttgtttaaatcaaaatgggaactaggtcacctctccagggttggagggagtgtataatctcttccccgcaatgtgtggcttgccaaaaacactgcataaaaaattaaaaattaggatatcctaaaagccactcagtattttctatgttcttccaattctaaaatgtagcatcatttacagattcatatgaatattccagagctctttacaaggtgccctttcccagcaaccactgtgcagtcccctggagaaaccacccaaaagcagtaatagtagtaatagcagtagtagtcatagtagtagtaacagtggtggtggtgctggtgctggtgctggtgctggtggtaggtaaatgttgaacagttaactctttggcaggtaacaattagaacttagtgttagccaatttctctggtgtaaacacgccagccatggcttattccaagtaccaggacaaaggcactgcatgtgaagttgggaagagatgtgcacaatcagctcctgcaaaccactgcaggctggcttctgcacaccactggctctgagacacacgtgaatattcaccctggcttcccctggccacaagcctaagatggtcgctctgcacccacctctctcaaaggaatttttgatgtcattgacttccacctgagatcctggcactctgaagatcccctgctgctggagtcctaaaaaagaaacatacagaaaaagaaatagtaaatccacgagaccttgagttcattagactaccgggaatatcagtgactctccccattgcttgtctctttctcccccgatcctttataacagagtcgttccctatgaatgtctccagaaatggccttcacggtaaagtacagctggccaaaatccttggacacatctgcttcaaacacttgtgatcttctgtttgagcttaaaggaaaaggcctcaagaagtttgtatcaatacctttccttccctgtacacagacatgttctgccttcaagaagagctagactccagagtatattctggctgggacttgagagaagttaaatcattaaagtaaaactatcccttttttttacatgtttctacaagaccttaacaaagaggagacccttatacatgacatgacagtaatgacataacagcagcctgtacaactgaaggaattaaaaggtctgtttcatcttaatgagaattaatgggggagcctgtgatcctttccctatctctgtttttctatataaaacaattttccacattataatttaggaagtatttactctcaaaaggcaggctttggtcaaagtttggtttgtatatagtatatcctcaataaatgcttcttcatctctttacttaaacaatattgaacttctgccacccaagtctctgatcccatcttcctggctccttaccacccagccacactgaccttcctccccatgctaggcctttccactcgccatcctccattctctccacctggactgcatagctggctgcttctactcggtattacttagttcaaacatcaccccctcggagaaatctctcctcaccgccttagccaaagcacctcctctcctttccagccattctctatcctctttaaattagtttcatggcatttgcactatctcaaatgatattatttatttttccacttgataatttccttgcccttttcattggaagtgtaagctatgcagggcaggcattgcacctgtcttgttcatgcctgtattcccactctccaaagcagtgcctattatgcactcaataaatatagttttggaggaatgaacgagtggataagcaccagttatgttctggtgacaccatggttaacaaatcccagacatcattattaggttggtgcaaaagtaattgcggtttttgccattcaaaagtaatagcaaaagccacaattactttggcatcaacctaataccttcatggagcttataatctagccgtattagctgatttactggcaaactccattcagtgctcaaagcacagagctatagggttgagttctcttgtccatgccctttctactctccagttttcctaggtcttggatcctctcaccatgatctccatccctcaacacacaggctcaaaagcagcactcagaagagcagctgctgtgtgcagtactttccccctccaaagcagagctgtgacgggaagtcttccaggacaaattagaatctcatttcctatcagaacagcctagcacctgttctgcagattgctgaaaacactggcccaagatccagcttaccatataaattgatgtaacggatgcagctctcgactacaagcggtatagcttgtcctgaatccttgagaaaagaaaaattgtgagttttatggggcttgacaaccaccacaggaaaaagacattgcaaacaccgattacagactcaagccagaatattagtaccatcagattagtaggaaaacaagcaaggaactgctaatcctaaagtctccacggacagttacaatagagagtcttcaactgtatgcacaaaaaggcatagctatgattattttaaagaaatgctcttcttcttacccaactggaaaggaacctgggctcaggaggcctggcaggcccacttgggcagtggagagggaaccacctcgggggggtgctggagtctggccttgaagagttctctgcctccccctccattttgtcccaactcaacactattttctcagtgctcaaggatcaagtcctcatcctattactgcagtacctgatgtcagaattaagggcacaccaggggggaagcaaggctggcccctggtggaaattttgagctctaagaaaagaagaccagttctactcatgaagtcacaagtaaacacccagatgcatactgcatttaacagtaaacatgtcacagggaaaagctctagaggcagccgatgtcagccattggccatccaggggccaaccttactctaaaaggctgaaaaagatgcaattctcaacacaggcacctgggatgtgaatgtattttcaatgacatcttcctagactggtctacagccacaaatgattatggcggaggggaaacattttcttttggattccattatttgttgacctctctgttattccaggtcacttaaagagcatcaaattcttttaaactttctttaaaaggggccaaatcaaaggcctagcctcctcacaacgtgagtaaaccatgaggcacatgtaatatgctcttgtgaagacagcatggatttggatatgttcttggctcctccacaccccacctgtgaattctttccttgattgactgtgcccagggacaggacaagaatatggacccatcagcaacaggcaaggtgggctctgttctggaagtcagcactaaagacagtttccatcacggtgaatggggctaatgggcctttctagtaaatacctggttcctggttcgagcatttcttcttcctctgataacaaaaaataaacaggcagcagagcaggagaaaaagaaaagattatgcaggaataagatcagttagagtaagcagatccttcagagtccgtgaacgccgaaatgcaatggcagccagccaaggtcctggggagcctgccaaacagccggcctgtggggagagccaccctcaagcctggaagcttcatgggacttctggaagccacccagccagccttcccatgtggctgccttagctgccctcccagacaccagctgacatgggggcctctttcagtccttgtgaaagagcagcaactgtgtggactggacccattcccatccctgtacctagcttctcttcaacaaaagggactgtttatgcacccatggacaaaagctacctacgaccccataagttattcccagctgcccacaaaaaggagagaaatacacctttatgtccactggaacaatgtctctggaattcagctcaagaaacattcttggtgaaaagttcagttctaacaagatcatgtctacaaggtaccctctggatagatgcccataggtttccacctgatgccaaattccaaacagcttcccatgtttccctgccgtacaccctaagttgcttttcttgggtatccacttggctttgctctccttcctcccctcttgacccttacactggcattaaggaatacaaaagctgaggaaggcctggaggagaaagggaagttgagtcagaatgccttcatgagcttgggggcagaactggggcctttactttcactaaaagccactgatgatgcccattttcaggggagcgccatcggctctttccacctgtgcagcaggtccatctctggggtgagcacttgtcccatccaggctcctggaggatgtgtgccttctagctagagtcatctgtccagttctcagcatctcgacagctggaattgtctgctacctgacatgctgactaaatctaccagaatcccagaactgagcaaacagcctggtcgaacaggctgtatgagcaatatgctaacattaatgctaataatcataggtaatacatagtgcttactatgtgccatccagtgctctagaaacataacatatagtggctcatttaatcttcctcacaaactcatgaagtaggtaattgtcatgcttattttacagaaacaagaagaggattctccccttgtcccagaggtgaacctcctgggcttcaaaattggctcttataaaaatgagttctccttttgcctgagaggaggaggaaaaaacatcaaggattttgaaaggggtttgtttattcaggtagggtccaagaaatgtataaaacaaactccagcaacatttacttatgattatgaacccaggggatgcttccttgtccctctagaccaccataattgtgaagtcccagtgatgttattttattaaaaaaacttttcacaggtgtggtttttcaaagctggggactcttagttcaatgttctttcagaaggcatgtgaattataatagaaaattaaattccattctcaatagttgaaggattgaatacattatactgccttttcattctctgaaagttaataatctttcacagtaaaactgtgctgtaaaacattgaccacttagctcatagtaggtgcacagtatgagtttattgaactgtgctgatggtatgtgatgagtacagtgtgactataaagcaacgcaatagtaaggccaagtgcagtggcgcatgcctgtaatcccaggactttgggaggcccttgggaaggatcccttgggcccaggagttcaagaccagcctgaacaacatggtaagatcctgtctctacaaaaaaaaaaaaaattattttttaatcagccaagcatggtggtgcatgcgtatagccccagctactcgggaggctgaggtgggaggatcacttgagcccaagaggtcaaggctgcagtgagccgtgattgtgccactgtactccagcctgggcgacacagcaagactgcctcaataaatgaatgaatgaatgaatgaatgaatgaatgaatgaatgaaatagtatttaacaaacacaccttttttcccagtcaaatgagtattattcctccaacttttccccttaggaggtgatgcacttattccaacagcgctgccactgctcaagtgctctgggctgtcgctgctggggtgctcttttcagagccagtggaacagccccactgtagcatattcctcttgccattttgcacctccaatggcatcgcaaagctcagcttcaaacggagctttctattccaaagacaaggtgtccatttgaatacatagtcttggccccactggtaaaggccatgctccaggctctaaagaagattgaccaaagcagctgcagcaatgccaacacattcaggtaagaaggtggcttcccaaggtgactgtctcaaaggggcaaacactcatgtggttgactaggttatgatgtgttggtcagaaggaataaagtcagataactttatagtcacatcttatatataggacccctctattacgaaaatacttaactcaacagaatatctacttgtcaagtactgtcagataagagttgattccttccaagtatcctgactgatcacccatttccaaagacctaagcaaactgaggatgtccctgtctctgagccttcattccttctgttcttcctttcaataattccttctgtcctttcattctcctctgtattcccatctttctctcaaagcccctccagaagcctactgtgcttgagctcatagctcttcttgctctgaacttctttttttttgttgtttatttttgagacaggatcttgctctgtcaccgaggctggagtggcatgactgtagatcactgcagccttgatctaccaggctcaagccatcctcccacctcagcctcccaaagttctaggattacaagtgtgagccactgcgcctatcctaaacttgtttctgtggggataactcaccaggtgctcatcctaaatcaccttccactttctgccttttgtgtttaaaattgcccaagctccactactgactccttgagggaagggagagtaactagccccttcttggccatggaccatggctcttttatgggcaaggatgaaagaagaaagtcttggaggagagaggagggaggatggagacagaggattcctttggtacagccctgccctcccatgacccagtaaaccactccctctgggtcacctcctgatcttccttcctgatgcatccatgggcccttccttttgggaatcctctacgctttggtcttcttaggcatcctacagcagcccctgacatccttcgaccctgggcagtcccaacttgggccctggtcttccacttgcccttttccccactctcccttccccagaactcagcccacaggcagagacagtcctgggacccaggctggtcctgcttaccccctcccctgcctaaggccaaactcatatatccagtcttttgctgtcctgcaagtcttgtgctggaccctgtctgaggatcacaagtagacagctggagcacgagcagcctccaaaacccccaaatcattggcaaagcccaggagcctttgttttttctcctgattgatatctatcatcttctctgaagaaagtgtcttcattagaaggtagtgggctctcaaatcagttgcagggacttccctgcttcctctaagtaatgttaagagtgcttctccccttcctcaagtatctccccagctgctgctcttcgcttctccatcttcttaatttcccttgagccattatatctgatatggcttaatctcataccctttacaccaaagagaaaagaaaagagaaactcgcctagctaaactacttcaatttttagtttaaggtacaaaggattaacctagaattcaaaagggacaacctcaacttttctcccttctcccagaccacctaacaggaagcaaaactaggtgggaggattttctcttataaaaaatgtatgtgtttcctttgctggtatatatgcaactaaaaaaaaaattcacgtgtataaaaacacactgatacccacagggatttcctctgtgttgctttcaatctagctcctcttgggagatgtaggtgtgaagtgagggaatggggtttctctgactgtccctcaggtgttaggactgcagttgctgaagcaatgaagcgtgaatgaagtgtggcatttcagccatacttggacttccctgagttctttcatgatctgaatccctacccccagggctgagaattgcgcagggcacttaggagcaaatggttagaagccacggcagctcccgtgaaaagtccttgctgaagctaagagcaggctgcagtgaggaactagctccacagggcctggccaaggacagggctgtctgctggcagggaggcgggcggacagaggctgccattacattgggtgcattcgcggactccacggctccccagcaagtaccttaatgaatgcttccatactgccgttaaagagtttatggctatacactgagagaggcctaggtctcctcattttctgtggtttagggggaagacaggggggcctaggggaaaacggaacaaaagaaatcaagaaagcaaccaacataaacatacaactgggaaagatgctcttaaaacccacgactaaaggggaacacaaaatgtaaatggaagcccctgaccccccgccaagacattggtttccaatgttccatctgaaggcctttggatgttttaggggaccttaatttacccacaatgccaagcaggagcaactcttacataactcaaatgcattctaaatcttagggggaatatagtacatgtgcaagaaaccactgaaactccaatcagaggctgtcatcctgcaaagctgaccagatggagggggaatcaggggagagagatgtaatctgtagcccgagaaagcaagagactttcaaaaatgattgtgagggttaattttcattattttggtttaaatttatcaccaagtctcaactcccaatgtaccagggcactgatcttcctaatgcctcttggcatttcaaatgcacttgactgatctttacttcattgatctaagagccaggcaattactattctcatttcagagatgaagaaactgatgccatgagggaggctgcaacttctttggggtccctgggtgaccccaggataatggtaatatcctgctctttagtcaagtacactttcttttctttcttttttttttttttcctttttctttgagacggagtcttgccctgtcgcccaggctggggtgcaatggcatgatctcagctgaccgcaacctctgcctcccaggttcaagcgattctcctgcctcagcctcccgagtagctgggattacaggcatgtaccacgacacccagctaattttttgtatctttagtagagacagggtttcaccatgttggccaggctggtcttgaactcctgacgtcgtgatctgcccgccttggcctcccaaagtgctgagattacaggcatgagcctccttacccagcctcaagtacattttcaattaaagcactttcaaatccattattatacttaataccatctcaaccctgtgcatgtggccccattttacagaggcagagactgaagcctcctgtgaaggagaactgacagagctggagcccaaacccaggactctttggctccaagttcagggcttttcctaccaggccaccatcatggagccttagggcacttttttatttccagccaaggactcatctaccccagtaacctttgccatgggatcaggttgaaagtgtcttgctttactttaggatttccattcctaaagtgtgctccactcttggccacagggaggggtaaccacaccacagttcaccagagaaacagccacaaacactggacccgtttccagaattgctcaccatgcatatacctgtgttggcttatttgctcatttcaccacacaagttggcctgactcaatggtgccagccttctggggcaaaggccttttgaaggttaagaagagggcccctaaccaagagaggcagttcattttcaaatggcttggttcaaaatttgggtagcaacaagtggggactcagccaggcacagataatgtccacacatgacaagcaaagacctggtcccccaagtcttgattgatttctgtgagcgggcaagaaatcttccagactatgcagccaatcaggattaatgagattcatgctgcctctgctgactgggcttgtggtacctgtctccttcggtaagccagccatccccagggacctctaaccaacttctcctaggtgtttgagtattgagcaaatgctgctagctccagtacatgcatgggcaaaaaccaggtgaatccaaatatcatgccacccaaacaatggaaacaaaataacagcacagatcaaaattttgaaaagaaacaacaggcaagattctttcaagcccatcttggatctatgtcaatttggttagctaagtccatgtcatttatttttcaaaaattacttatttttttttgaggatgtatgtatgtggggtgggatttcttacaagagctgctcttaaattttcaaataccaaaggcaaaagagagtgtcaaaaatgtgacacaaggccaaaggttttaagtttggggattagaaataacttgatgatagcaacattgtcaccctgttttcatagtgtttggcttgtttttgaacattcccagatcatttccttatcacattgcatgacaacctcacaacaaccctgtgaggctgggaaagaatattcaattcactttacatacaaggccagtgagcccacaaaagatgaagaaacttgcctaaggtcacacaaataaaatgtgattgaggctggtggtaaaattcagctcttcctactctcaaggatctagtgtgagtatgaaagtgattttatcatagaacatccagaagtaacattaaattatctgttaaattctcatggccaggaagagcggagactctaaaagcaggtgttggacactcaatatcaaaaaacctacggtgcccaactggagggtttccttaaaagaaagtcctaagtgttttttgttttttcttaaattctacaaagtggaaaaaaggggaaatagcatatgttttcccatttttcctgcccaatccagaaagcaaaggactgtgtgaatcacacgaggatttctttctttgtgtggtgctctgtgcactgtctggaatctctgacaaggaaacgtagctatcccaactttgcacaatatcaaatctatatcgacttactgaagtgctgggtggggcacaaagtggggagcaggggggcagctcggccaaggaaagtggggcagcctaagccttccatctcttctgctgctcagatgcagagcaaaaaggaaagaaagaaagaaagagaggcagggaaaacaggaacagagaaagccacagagaggaagaaagagaaaccagagaccaatgtcccctttctgccttttaatcaagatgaaaattaacacacgttggcaacacaggaaatagcctcaaaattatcctgcaactaaagggatgtgatgaaaaattcccctagataacctaatagacttggaggtcaacatcccaaatggtggcaatgctgtagggcaatgccagtcgggcccttggaggctattcatgggctgtgtactgcgttgcatctgcctgaacaagatctcaagtgatttcacctctaatccagaccacgagggcatgtcaacctgggtaaggggagccagacattcatttgaatcacaataatcaaaccttatatttgcatcttgctttgacatttgcaatacgcttttaaacttaagtgcattatcacatctggccatcctgaattacagggttattatgaatttggtctattctaagataaggttctgaagtgtgagaaaaatataacatgctgcagcccatatgcaacaccagttcctctatacaaggtcaacagcaacttagctgaggggatcctgctcaaataaccatccagaaatgatatccacctcgtgtgggagtccatggaagatacagagagagccataggacagagacattgttagcaacaatttccacaagttaaatcatgattttggaggtaaggggagacttttagtttactaacaaagttgtctttgaccttgaccaggaaccagagtacacagggctatgtctgcaattgaacgcagggtagctgcagttgaatgcagggtgtctaagtgggaggtctgataaactcagcttggatttcccaggccctaggtcaaggagggtgtggaagacaacacttcagagggctttatttaaaacacaaaacaaaacaaaacaaaacaaaacaaaacacacaaaccctcaactttcccctgagggaagaccctgagacctggccaagtgtttgattacagatctcctctcccacactctgctggaacaaacttctctgcgtgagttctaggaattaggaggaagtgagggacagctcaattcatcccccatctgtttcactatttgcagaatttggtgtaaaatacagcttctgttgttttgagactatgacaacattctctcgccagaaaagaaaaaaaaattataatgggttcgtttctaaaaggttcttcgaaagtgaccctgcacatctgccgccccgtgtgctggaagggccttgcctggtgtgaatcatcctgatgtttccaaattgccagagcccagaggaacagctgtacgggctgaacttctgccaagccctccgtctccccatcctgagcccaggaaactgaaaaccccagaggttgccaagactttgcccaactcccttcccaaggagcaggagagagttgggagttcatctttgctcttgccaaacatgagggcttcccaggatttggggccactggaaagcatttgtgggaaaagaaagaatgccctcaggtccctgggcccagaaagtgaggcaaaaagtagcgctctactgccgtgtgatggaaaagtgcaggcctctgggccactggctgaattccagctaggcagtgcaatatctcttaataggaacatagaaatgaaataggctctaagcaaacaacctggccagtgacagagccacttatggatctaagctctctgaaagggaagtaaagtcagcccctgggctatcagctgctgagtggaaagtgttcactggctctggtctgctcaggaaaaagcgcaaaagggaatgttgaacaagctgaagagaaagcagaagttgcccgtgtgttactttccgtcagctcatccaagtgcccgtgaggtccaagctagggtgtggacggcaggagagtctgtgcacgcctatgcacatgcgtgtgcccagctgcgcgcaatctgagcctggcccaaagccttggtacatggggacctcaggctgggcctcgcagcatggctgggcagtttgctcagcatggtgtagcaggtgggaagagaggtcaacagccaccccacagcctctggcccctacaggctgccctcagccactctgagtagacaatactgtctcacccgatggccagcgcaaagggagggtgccccactgccacacagcagccccaaaagcgccccttccatcgccagcctggaggggcgtggctttgtcagtctaatgctagaacaagcaaagcagcaactgtgcctcacctgggcacacccacaccggcccttggggacattggtgaagaagccatccctgcttctccagctcctggcagtgcctccccagccccatcccactcccacctcgggcagcagatgaaagaaaacacaactctcccactctcacctggtggtgccgcattctgctctttcccctgcaaagaaaagtatacatgaatgtttaattgccttttctttttaatccaaagaacattcatctttttctaaaaacaaaatacaatgagtcttaattatttatgaaatatgaaatctaattatgcctaaggtgcggtctgttgaaaagaactgcgtcttattaattcttcattaaaagcctcctgtttgtagggctgtgttcacacacacattattgttcacagacatattttcagtgattctcaaactacagcccgctgaccacttgcatcagaaacatctgggggtcttgttaaagatgcagatttcttggctgtctcatgggtcttctgaatcagaatctctgagataaaaacccagaaatctgcattttaactaccacccctggtgatcacttctatgcctcccaaagttcaaaaactcctgcaatgtttaatggcaacaaagattgaccgagcccctgttgtatgcctggcactgaaggataccagccgtaaggctggtgctcctccaccctgctgccctgcctctgccttcattcccagctgaagatcttctcattttctttactggaaaagaaaatcaagtactatgggttctccatgtgcatgcctccacgaggccctcccacctacctgccagacaaagcccagaccttctccttatgccctggttccatcccctctgtccttctgggggccttagtttctgcaggtatctcccctctcgctagcatcaccaatctcctctcttctggaccatttccaacagcatatcaacatgttctggatatgcatgacctagcttttaacccttctgttgaccccatttctccttccagctacatcctcatttctctgctcttctttacagcacaattccctgaaggagatgtctggaggcactactgcttcctcccctgctattccctcctcacctctttgcagctaggcttctgtcctcatccctgggctgacactgctcttgtcaaggtcaacacttaagggcaacaaggatctccttgaggctgaatccaatggtcttctctgtccttatcgtacctgacctctccgcaccatgctgctcagttcacgactcccttcttacaaagctctctactcttcactttcatgactccacactttccaggtgttcttcctgccctacaagttcctcagtttctcctgtctcctcctcattctgcccaacctcaaacctcaaaatgttggagtgccatcaggacacagacccagggctgctttccttttctacacatcctctctaagtgaccgcaagtgcttaccaaggactccctactctatgtccagatcttacgcttccctagaattccaaactcagatgcactgcaatcttttataaaaatagcataactgaggtataatttatatatcataaaatttacccatttggagtgtataattcagtgatttttagtgactattcaaagttatgcaaccctcaccagaattcagtttgaaaatatttccatccccagaaaaagatctttcatgcccactaatagtcactccctgttcctgcctccggcccctggcaaccctaatctactctctgtctctacagatttgcgtagtcgagacattttatatagatggaattatacaagatgtggtcttctgcatctggcttctttcacttagcataaagcttttgaggtctatccatatagtacggtttagtaattcatttcttcatatgacttggtaatattccatcatatgcacagaccacattttctttatccactcaacacaaattgccttcttttatctcaaaccttaaatgtttcccatagcactctttctttctatgccccaaacctactttcacccaagtcttcaatatctcaataagtggatatccacctcccctcttctttaagccagaagtctaacaggtgctctccttgaaaactgtctttccttcataaattaaatttgtccacttctctccacttaacactatcttcttagtccatgccatgcttgtctcttacctggacgactttctttttaactgggtctcctattccactaccatccattcttgcctcagcagccaagcaatctctttaaactgtaaatcagatcatgtccttcccttgcttagaaccctccaataacctctcatcgcacaagggacaaaatccagacctcttactctgttttataaaccctttgaggtcagagtagacccttcaaaatgctactccatctcctcaggctgctttctcctttgtgtgctctgctacagatgcagaggcctctgtgtggtcctcaagtaggcgtttgcatttgctgcctggaattctcttgctcccaacacttgcatggctcatttcaccttgtcttttgggtctcaacttaaaagctgtgtccagagacaagcttcctctatctttattatttattttatttttattctattctattctattttatattattttatttattttagactctgttgtccgctcaggctggagtgcagtggtgcaatcacagctcactgcaacctcagtctcctgggctcaagcaatcctcctgcctcagcctcttgagtagctgggaccacaggcacataccaccacacccagctatttttttctagtagagatgaggtcttactatgttgcccaggcttcttcctctatctaaagcacacacttgtctctttatatcacgtttctctatttaaattatcaatacatgtagcttatcattaatatttttcttacttattatttgtttacttgtccactgccagtctatctccattggaaaatactgtgttctgtgagagaaggaatcttgtcagttcttaaaactgcgctgacaccaaggtcttgggcagtgtttggcacaaagtatatgctcaacaaatatttgtagaatgagtgaatgaatgaacaagtgctctatctgcaagaagcttagtaccaaatgagtcaataagcagattacacgatagtgtaataagtgctgcagcacaattgtacacagggtgtcattcctgtcacaacagatgagcaaatggacttggagatatggagtgactttcccaagtccctgctaagtgtagagtctggattccaatccaggttgcctaacttcaagtctaagtttacccagggaagctggttccacctccacaaacacaaggtgagggagaacagatgtccccagcagtatatgcctccgacccagggactccctgaaggcagcatttggcttcttataatatcccctcttcagggatgccacacattagaggacagctgccttggcaagggtatggcactcaaaatgaagagattaaataatatcttttccttctcctaccaaaactgtactgaaaacaaagaggtctgagtcctactgtttaactcttttatcaactcactgcgtgagcttggacaagccacttcctttctttgggcctccatatcctcagtttaaattcttcattgcctgtctagtactttgcagatgctgacatccctagatctcactcaccaactaccagcagtactgtccccagtcatggctccaaaaatgctctccgtttcctaatattctcaagaactgcttccagttcagaatctctgaaaccagtgccatctagtagaaatttatacaagccacaatttctggtagccacattacaaaacgttaagagaaacagatgaggctgggagtggtgactcgtgcccgtaatcccagcactttcggaggccgacgtgggtgaatcacttgaggtcaggagtttgagaccagcctggccaacatggtgaaaccccatctctactaaaaacagaaaaatcagctgggcgtggtggcggacacctgtaatcccggctactcgggaggctaagacacaagaatcgcttgaacccaggagttggaggttacaataagctgagattgtgccactgcactccagcctgggacccccagagctagacgccatctcaaaaaaaaaaaaaaaagagagagagagaaataagtgagattaattttcatgacatattacatttgacctaatatcaaaaagattataattttgatatgtgtcaatatagaaaatcaataagatattttctattttgtgtgtatgtgtgtactaactcttcaaaatctggtgttcattttgcacatcccaattcagactagccatgtttcaagtgttcatcaggcacacatggctagtggccaccatactggacagcacagctctcaactctggaatcccacctagcactaacattaaaagacttttagaagaaagaatcgagcattttatttacagaaaaaaaaaaaaaaggcagaatagggccagggagggaaataaggagaggaagagagtaatctgggtctgaaaatagaacttggggcaaatcaacaggcaactccttaattcctgagcaaagccacaagcagttacatgggtggctgcagttggtggaattggaaccaaagaccaaagcaggaaaggagaaaagttcggtaaaacaggcaaatttgtcctgtttgatttgactgtgtgtctggagtcaagggcaaattcctaccagacaccagtttggataaaattttcaggtagacacaagccctcctgttagagctgatggcagcccatgaaagtggtcaggcgatggcctgggattgtagtgaacaaggagtgttgatttcctgttccccctcctctgggttcccaaaccgtccactcttctgtgtactcaacaagttacaatacccttctctcaattcttctgactcaccacatcctttcccgcatttgcaaatgttgtcccctcttccccaaaaactctttccctggtttttcacttggctgatgtcttctcatcctttagtttcagctgaaacagcaactcccctaggaagcctctctgatcaccctatctaaagcaggtcccccccatctctcccaaacacacacaccattgttctctatctcagcccaaagttttcattcatggcacttaacacaattataattcccacccccagctgttttttaagagacagagacttgctctgtcgcccaggctggaaagcagtggcgtgatcttggctcactgcagcctccactgcctggcctcaagtgattctcctgcctcagcctcctgagtagctgggattacagggccaccaccacaccgggctcaattatcattgtttacttagtagtttgtttaccgtttgaggtctctcttttccatgagggcagggaccttacctttctcgtgtaccactatctccccaggcctggccaaacaaaatgcctgcgctcttggatagatgggtgaacagaagggggcaggtagaaatcaaaggttttaggatgtggagtggaatgtcagaacacactgaaggaaaacttttctctgacgtggaatctaatatgctgtctttcagcttcagactcacattccagctctcaagaatcccacaaccagcatctttagaaacagggtgactgtctcacaaatatgggaaatcaaaacttgcctatcctttaccttctgagacctgttgggattttaaaaatatattttatagttggtggttcagtaattttctagaaagtcagatggcctggtcctggtggccattttgctctgtgatgggcaattaaagttggcatgaaaaggtcatgctccttcccttttataggtggcacactgttcattcatgcttgagggactttcaaaaattcaaaaaccaaccgcatcttgagtgtaaaccctggagcttacagaatacccacaccccagagcaataaaaaggttataagtctaagactcagagatgatgataaactgagaattctctggccaataaaatggcatagcaacagccaaggtatgtgctcttgctcccgagaagcgccagtgacatcctttgtaacagggaatgccatttgccaagcacctggaagctttttgacttgcatgtctggggtcaatcatgttctcaaatccacttttaagtaaagctgacccaaaagaccttgggtttcatctaacttgtagtttccttgagccatcctgtcaaaagagtacagcagtccacgcttatctgtggggaatatgttccaagacccccagtggatgcctgaaactgtggatagtaccaaatcctacatgtcctctgttttttcaatctgataaccaaggcagctactaagtggccagtgggcgggtaccatatccagagtggatatgcaggacaaagggaggaatcacatcctggcagagatggagccgcgatggcgtaagatttttgctcagcaaagaaatttgctcagcgtgctcatcatgctactcagaacagcgagaaatttaaaacgtatgaattgtttatttcgggaattttccatttcatattttcaggccacagataaccacaagaaactgaaaccatggaaagcgaaaccacaaataaagaagggctactgtactttacagaaactgaggcactagacatgatactacaaaatagccctcatacggcataaaaaggccactgacgcagctgtaacgctaccctactcttagaagagaatcctactgaatagaagaaccaaaacgctcaggaaaaggtgaatcaccagttgacactaagaaggatgaatttgctaagattctgagctctctttggcctgctgaattttttcccttcttccttcacccaatgggcaatttccaattgatcaatttatcaattaggtcagtggaaattctcccttttcacccagtgccctaagaatctacctgtatctttatcgtgtagtggctatataaaaatgactggagatttggtctcaatttattcagggtccatctttttcagttattcagtaatttgttaacttcagttaataataatgtaccatattcattaatgctgacaaatatagcatactaatgtaaaatgttaataacaggacaaactagatgtggagtatatgaaaactttatactatcttcccaacttttctgtagctctaaaactgttttaaaagagaaagtttactttaaaaaaaaaaaaaaaaaacttctgtagaactgaccagtctatcaagaaccatccatttgtcaaaggaagcgcagtgagcctctccacggccagcttactgaaacacaggattacggagactcttccagttggctttttcttagctgcccctctacttctgaaaatgcattttccgggaggtttttttttattgctaatcagctcaaaactcagaagagagactggtagagcaatcttagagcaaggcgtagttgaaggctaaataaacttggaggaccaaatggaccaggagttatgccaaaactaagtatggtgataatgatgatgatgatgatgatgatgatgattgatgatgaccgtcatcatcaatcatcatcatttgagttgggaacacaaagcaagcccccccggagaatggcggcaatgaaagctgcctttgtcagataagggccgcaggaagacaaagcaaagggcctctttattcatcaaagctccactatgcttctgcaccaagaaggcgtgggcaggccactgcaccaggcccaggatcgtattttttaaaagaagatctagttttccaaattcagcatctaatttcaaaaatgcaagtagccaccaactcatatggtcctaccttttggttaactggctcatgaggaatagccccctgccctgtgcctataaataccaaccctcctctttaatgctagtcttagaagctgcccccatggcacccacaccctgagctccactcttggactctctccctttctcctccattctcactgtttttcttccctctttgctacccaaactcctccacaccccctttacccgctggcccaatactgaaatgtcgggatgggtaaaatttagagggaaagaatgaagaaaaagctcactgcaactgagtcttcccccctcctaccccctagtcaatgagttttaacaaatgtctacccccaagtataaccaccactcaaagcaggatatggagcttttatttccgtcagcccccaaagttccccagcccttactacctagaacacacaaaactaatctgcagtgacagaaatcagatcagagtagagtgtggggtgctgactgcaaaggagcacgagggaatttttgagggtgactgaaatgctctaccccctgatttgggtggtggttgcccatgcagatgcaaaggccctggggcaggaataagcttggtgagtcctgaagggcagaaatttgctcagcatggctgcggcacagtaaggaaagggagaatgactgatgaggtcagggaagcaggcagaagctaagtggtataaggcctcatgtgccgtgacagcagctgggattttattccaactgccactggaatgcattgagtggctttaagcctagttgtcaggtccctcgagggccaaaccctgacttacatgtatggattttccttctctggacctagaaccctagccagacactccagtagtattccttgcaaatagtgtctgctgaaaaatgtcagtgccagcctctgaggccctggattcccactccctacctgatggatgcccctctatcactttgccttggactgtccctgccaacctaaactaagacttgtggttggcctctattttcttttcttttctttttttttttggagatggagtctcgctctgtcgcccaggctggagtgcagtggcatgatctcggctcactgcaagctctgcctcctgggttcacgccattctcctgcctcagcctcccgagtagctgggactacaggcgcccgccaccacgcccggctaattttttgtatttttttagtagagacggggtttcaccgtattagccaggatggtctcgatctcctgacctcgtgatccgcccacctcagcatcccaaagtgctgggattacaggcgtgagccaccgtgcccagcctctattttctttattttattttttttctttctattaatcaaaaagcaactcacaccctctattttctatagccagattggaccccacaaggcatctgtaccaaggtgattttcccagcctgcccagtcctggtaagtccaggttcattctgccaggtgcctgctgtctcaagcctgaacagctcaacacgtcagggggccacagtgagagccagtggggaacgcagcacctcccagagggcctccaccagcccactcaccttcgcccagggtctgcttgagtaaatcgtgcttggcctgcagcttggtgatgaggttactgccattcacatactctttaaatttctgtaagacacaaggcacaaggaagttatagattgcaaggccgagtaatgggatctctgcctctgcaactgacctctgggacacggaagccgaacagagatcacgtcacccgcagggaccccggcgcagggaacagagaggcctctgcatctgcgtctttgctttcctccatctagaaccccagcgctgacaggcggaggccaggcccttggagggctccaggcctttcaggtcgggggttaggaacacaaagcaaaccaggggagaatggcagcagtgaaagctgcctttgtcaggtaagggccacggggagacaaagcaaagggcctctttagtcatcaaagctccactgtgcttctgcgccaagagcaataaaaatgggagccgtcccaggggccacgcagccgaagctagggagctttatcggatctgtcagagaggagcctcggaacgagtcttcctttcatctggccccactttgaaggaggaggggcttgcaggcccctgagaggctttcccattaaaataacccaaactgcagggggtgataagattttcttctttgtacagatgagaaaaatgaagcttgcaccaggaagtgatttgtccaaggtcccacggaaagtcagccatgggccaggcctaaccccagcctgcttcctagttcagggctctggcccagagcagtgcacctcagagcagtactgagggacagagaataggccaggacagaaacacacctacctgcctggaactcagtgggccttagccacctctacacaggtgccagcttcccccacctgcactgtcacagagccccactgggcatgcctctgctgcatggccagctgctagagggtgggctccaagcccagctcatctccagctccccagtgcctaaagctgtgactggcttagagtaggtgctgagaaatttcactggatccctccctcttgaagcttacgtggtgggctggggagggagacaataaacgaacaaaaaaggtaaataaaataccactcagtcaggcggtggtgaatgctacggataaaaagaaagcagagctgagcacggtgactcacacctgtaattccagctgctcaggaggctgaggtgagaggattgctgaaggcctgaagttcaagacaagcctgggcaacatagcaagaccaagtctctaaaaaaataagtttaaaaaactagctaggcctgggggtgtgtgctgtggtgccagctactcaggaggccaaggtgagagaatcacttgagcccaggaggttgaggctgtagtgagctatgttcatgccactgcactccatcctaagcaacagagtgagaccctatctccacaaaaaaataaataaatcaaataaagtgggaacagtggactggaagtctagaagacctcactgcaaagtggacatttgagccaaggcctgaaggaggtagaaagggggccacatggggacctgcgggaaggaggtttacaagcaaggggtacagtaattgcaacagccctgagaataaagtgaaggaggtagatgtgcctgccccaaatccacctgctagtttctcaaagagaaacccactctattgtcccagccagcacactaaaaagggggcagagaaaagtgagctgcagaggctcagacacccccaagtcaactatagaggagggcctctaacatcaccaccttcccattgacagctatgggggaaagacccactggggtaggggctgacacatacacaaataagactggggtcacctcacactggcccaccttgatgggtttctggaacgactgggctggtgggaggttgtggtgtcctctctccttttccatggtcctaggctcccaggacctggcctattggccattaagagtcactcgacttgtatccacagagcacttgacagttttcacacacgtacgtttaagcctcatcagagtcttggatggcaaatggggaaaacatcatcaggccccttctacccagaaggaaacagaagctcagaactgtggtcactcactgggtacctcgggcagattaccgagcatttctgagcctccctgtcctccccagtgtaaactgagagtagactcagtgtttctccaagtgtggggcagagggccaggggcttgtaaccagctggggagactgtcaacacgcaaattcctgttctagaataactcgagtctaacccttcatttgacactggaggaggaaccagtgaggcccagaagtgttcacaattccagttgcccatcttgggagagtggtggtctgagaacctactttttttttttttttaggtaaggtctggctctattgcccaggctggagtgcagtagtacgatgttggctcactgcaatctctgcctcccaggctcaagccatgctcccaagtagctgggactacaggcacacgccagccaagtagctgggacctcagcctcccaagtagctgggacctcagcctcccaagtagctgggactacagccacacaccaccatggccagctaatttttgtatttcttgtagagatggggttttgccatgttgcccacgctggtcatgaactcacgagctcaagcaatctgcacacctcggttcccaaagtgttgggattacaggcatgagccactgcgcctggctgagaacctgcatttttaacaagcttcccagatggttcaaatgcacacttcagtttggtaactactgtcctagaggctctctatagatgcttccagcaataatgtcctctcattttatctcctgtccaagaattccccaaaaaagcagagctgaggggtaagctgatattctgtccaccgtgtctcactgctccaagaagttgaagatgtaatcccaaatgcctaactcatgccttggcaggtcatccactggttagcgcaaattacagcctggggctctgtagctcatctctgtccgcctcatttaagcttcaaccacctgaagaacaacgaatgtccgcaaaataaagaatgccatcaaattgcattgatgtttgcattgaaaggattacgatgtccttaaaaagacctaaaataatgagtcatgagaaggtatactaggaaaccaggttagcaaactaagtattaagaataaactataacatctgatgaccattagtcatagatactggagaattctcctaacttcgagtaggccaaactcccttcttgaattctgttccccagaattctttgcttctactgccaaagtgaattaatcttcatgtgcatgttgtaaccacaaattctctttgtgaacaccgtaggctccatggaagtggtgaataccagcaatcagcgtgggctgctttgctaagctccgctttgttttcttccttgacagggtcaaagagtgttggagaaaatgtagtgtgtatcgactactggtttttgacaagggatttgacaaaggcagttataagatggaggtggaagttagaattgggtgggtttgtgatgggttaaatgactacaatccaatcaatattagcctcattgctttttttttttttttttttttttttttttgagacagtctcactctgtcacccagcctggagtgcagtggtacaatcacagttcactgcagtctcaacctcccaggctcaagtaatccttccacctcaccctcctgaatagctgggaccatagatatgcacttgtatttttctttgtagaaatggagtcgtcctatgttgccgaagctggtctcaaactcctgggctaaagggatcctcctactcggcctcccaaagtgctaggattttaggcatgagccatggcacctggccctagctgcatatttttaacaactctgtctttggccttggccttggtatacccattagtctttaaattgattaaagtttggaagccatgcttactgaatctgcaggtgacacaggtttgaggagacagcacgtatgctgagtaactggatcaggatgttgactaaaaccatgaattgaattcatcaagaggaaaactaactggtgataaacagaagacctgcccaagatatcccctacaaagccttaggaagagtgaggcctggttaatggcagcatgtagggaagacagctataactgataataacttagccttaaaataataataaaagaatatgatcttagaacatatgaataggagcatagtacccggtatagaaggggtgaaaattttgctcaattctttttttttttttttttttttgagatgaagtctcgctctgtcacccaggctggaggcagtggcacgatcttggctcactgcaacctccacttcccaggttcaagcaattctcctgcctcagcctcccaagtagctgggactacaggtgcacgccaccacacccagctaattttttgtattttagtagagacgggttttcaccgtgttgcccaggctggtctagaactcctgagctcaggcaatctgcctgccttggcctcccaaagtgctcggattacaggcgtaagccacggtgcccggccaattttgctcagttctgtgttgggcataccactgctcggagtctcaccttagaagaggcatcagcacatggaacatgttcaggagagagtcactaggatactgaggctactcaaaacaaaagcttataaggcaagactgaaagaatcaaatacatttagcctagagaaatgaaatcccagctccctgcaaccatgtgaaacactgccatgtagaattagcctccactctgggtggccccagagaacagaaccaagaaatcctagtgaggtaggtttttgaagatagcaaagataaaggaaaacatggtaataccaaaagccaggcacaatgcaaacaaaagggctgtctggggaaaaagggagattttaatcttgggagcaatcaggcagagtcaggatggcccctggtcagggatgtggctgaactgactcaagcatcccatggaagatttaaggtcccttacaaacctaatattctatgttcagtaaacacatgttgaactaaagccccagtccccgtctcctttctcctcccagtccctgtccaaatgaaagataattaacatgggattttacatgaagggctagcaactcaagagcaatttgcttggatttttgagggcattttttccaaagctcacacctaaatttaagacaattcaacatgataatctatatacataatttcaaggttgttccttgggacttgtacctgactctgtcagccattttcttatcaccccactgaataaaactgtctctggtttttttctagagcaagaaaatttcaataatcatcacccaagatcaatgccaatgctacccattgggaattcactttctgcatttcagaaaaccaagccaggcaacttaattttaaaagcatggtgatggagtcttagatccaattgacccatgtggtttctctggttctcagtagcttgggttgctcctgaaaagtcactgccagtggcttggccgacagtgtggttctgggcccaggatgccacttactgtaaaataaaacatttctgtttcctgctggttggctctcctcttggcaatgttgatcttgctcatgtaggtctcagaggcagccgacttgacggactctgtcgatcgactgtgttggaaggcatcggagacatcaaagtcctccacagtcagcatgtcctgtaatgtctgcatggtggcatccagggttttcctaacctggggaaacacagcagattgacaaaaatcctgtattctcatactgccgttgacacctaaagtccctttcccagctgtcactttacttcttccatatgaagtccctaggatataggcagaacaaaaataatccttctcactgtattaatgtggaaaacacaaattagtcaccaacccaaaatcacacagctggctgggatgaaaagccaggttgcccaatttaaagatattttatcgtatggcttctgccagagagaaccttgaggaatgttgcaacaaatgaggaacccaggtttctaggtttgtttctcttagcctaattatgtaactcaaaacaagttcctccaatgcaaggtggtcagttgagtagggacaacattagatgtgctctagttctcttcattcagagaaggatagagacaaagttgacaatggtgggcagccattcttcgtgcaacaaactctccaggtatctgctactggactcctatcaaaagcccagctgagaaaaggaaaactccaggaagacagttgctgaggcacacattgttcagctaggactccagttttttcttctggaatttcgtgggaccaccagaagcctgcacaagcagggcccacgggccctgaccttacaacacccctttgctgaactgtgcctaaaaggcagattctttgctctggaggctggttccaaaaacagtccctggaaaaactgcctccagtgtttgttataaaattattgtcactcaaagtctgtttcttttcactcagacctcagcttaaatgtcacctcctggtgacattggtccccccgatatcttcactcagtgcctattactgtctaatattttccaagctcattcatttcttggcttctttttgtgtttcataaatgaaaaataaaattctaagcccccagccatctgaatggacctctcctctcagtcaggggcattccaaagttaacctgaaaaactagttcaggccatgatgggaagggggcggcaaacctacttcattataccctcctcctttttggaattactgttagaacagactctttaagtctgatagaaacatttacagcctatcctctgaagcctacaaccgggaggcttcatctctatgataaaaccttagtctgcacaaccccttatcttaacccagacattcctttctttagacaataacttaactctttcaaccaactgtcaatcagaaaatctttgaatctgcctatgacctgaaagcccctgcttccagttgtcccacctttccagaccaaaccaaatacaacttacatgtattgactgatgccttacatctccctaaaatgtataaaaccaagttgtggcccaaccaccttgggtacatgttttcaggatctcctgagggctgtattacaggccattgttcactcatatttggctcagaataaatctcttcaagtattttacagagtttgactctctttgtcaacagtttcaagtattatttgtcttttctcactagaatattccctcccggagaggaggtgctatggtgcgttgtgtttggtcactttactctatatctagaacaatgtttggcacatagtatgtgctctataaatacttgaataaatattgttgaatgaatacacaaatcaattcttctttctaacgcagcatgacaggaagctcaggttcaaaattaagcacattcaagcccgttagcagctcatacagaagaacattggcttcattctcctttctttggccctgatttccaatttaaattccattaacattatgatccacatactattccgtgtaaacaatttaaaatcctttgggggaagatgtagggcataaataaataaagaaaacactctgttcatctcctgtctctttccaggtttgaaaaacaaatatataatttgtctccatacaacctccccctggggactgcactgatttgctatcatcctgagctccaatctgtctcacatttgtcctaggtctgtcctttgtggagatgaaaagcaaagttgctgtctctgcccaggatagaactcttgagatttgaagatcaagactgtgtcttcccacctcccccatgactgcactttaaagaataaacctgcccatgacctcgagtgtcactccctccatcctggtgtcctttctccaggggcctccagttggttggcatcctccttgcaggaagagtccaggttggaataggatgtttcccatctggcctcttcagtccacatcagaatagagccactgcactggtatttccatctgtacccacttgctgagaatcctatgccccacagctgcaggggagggaggctgggcctggtaaggctgacctgttccttggagctcagaatccatgacaaatttagtgtgccctaggttgtttatttcattgtgtaatttaaaatacctactgttatttctaatgataaaacagaaattcattgcagaaaatagaagaaagcacaaagaagtaaacagaaagcacctatcaccccacaacccaaacatagcaactaataacatttaagcatttccctccagtcttttttctatgcctaggaatatacatatgctttagtttactccagttatggcaatactgaacatagagtcctatttccttttgtgttttgtttgtttgtttgtttgtttgtttgttttgagatggaacctcactctgtcatccaggctagagtgcagtggcgtgatctcagctcactgaaacgtctgcctcccaggttcaagcaattctcttacctcagcctcccaccttttgtttttcttcaatttaacatcttataaatgttcctccaggctattaatgattcttggtgtgtgtggttttaatgatcgtgtactattccatcttataagtggaactatcatttcttatgcacttcgtggcacaagtggactccctgggacaagccaggccttccaaagaaaatcccttatagggcagaggggctcactcacctcctcattctctatcttgagggtggccagtctggactgcagctggtgataacgcatgagcagttctgtctggacgggctgctgagcgctgacctggcagacctgcaggaataacagccaccatctgtggttgccctgtgccctcctcacctgtgtggagctagggcaggggctaccattaacatcccaatcacagtccaggaaacaggggctcggaaaggttgagtgacctgctcaaggtcacagagctcataagtggccgtggcaaccaatgccagatgagaaccggggtcttcctactcaaagtccgcactcttgccactgccaggtgtggcctttcagtcatgatctacatttgggaagcatgtgaaggtttacaaagagccttaatttaatcttattaagcaaaactaactggttaatttcaaggcaagaaattgtggcaagaaagcaaccacctaagagaagccaatgggaaaaaacctgaatgggaaacaatcaggggcgcactcccattgtgccgcagaatgacactgcagcagggcagctgtgagacaatgtgctctcacagctcatagctcttcgtcccccagcaattgactgggccgagggctggaggaggggaagcacccagagaaatgctgttctccctctgccttctttttttgagacagggtctcactctgtcacccaggctggaatgcagtggtgccatcacggctcactgcaacctccacctcccaggttcaagcaattttcctgcctcagtctcccgagtagctgggactacaggcacctgccaccatgcccagctattttttgtttatttgctgtttgtttgtttgttttttgttgttgttgttgtcgttgttttttaacagagacagggtttcaccatgttggccaggctggtcttgaactcctgacctcaagtgatccacccatctcggcctcccaagtgctgggattacagacgtgagccaccgccttccacctttcatgtgggactccagtattacctgtgggctgggctgctggcaggcatgtgcacctcaccccttccaggaacacagctaggatcacaagggacagtagcgctctgtggactgtactagttatttgctactaattgcacaacccaaagtttacggtcaccagtggtcaccatgaggccagcattttcaggtccaggtgatggatcgggaggactgagagggatggggcagacacagcagtgcagccctgcagaagtaagtgggcagagccatgcagagggtctagcaaatgccatcttctcggatgcctccttgcccctcccctcccagcaggtgccacgggtggcccagctgagcctcactgggacccagaggctggctgggtctgggacactgttggagtgggttcccccaatgccccgagggagcagtgacacagacaagctcagggaactatttgcataagggattttgtaagccttgggtaacgagtagggctgtgttggggccagtgacaagggccttctttccatttgtttttcgtttgttttattcagaatataacaaggatctgagcagcacaagcactgaaggaaactcgatcgtctggtgtatcaaaggcttgcagtgttggaggaagggagcgccctggtggaatgcaccagcctgaatggctgtgttgaggctacagtgaggcccaggcttcccgtggacctcacccgcacatgtggggttagaacatgagcctgtgtgcagactggggctcccttggagtcttctagacatagctgggaggggttataagggaagccaaggtcctgtaattctgcacggggggcacctgagacagcaagatgagggtattagtggtaaactcctcagctggggaagcccatgaaccaggagcttgaccccaggcgtcggatagaaactttctgtacgtgcaaccagggatgatgtactggagcacatgggggaacagagggaagcagccccaagcccgggctccaggaggaagcctacctcatcccccatgtggggctggaactcgaacttgagtggagggcagaagacttgattgcacatgtccatgactgtgtgcttgtcacttcgggaatccaggttgtccactgcattctcaatgacatccagcccttcgtggcgagaggtctccaggttgtattcagctgagagataggtccggaaggtgcgggccaggctggcatggaagcccaaatcacagcacttggggagaggcaacaacggaaggttatgggtgacagccaggatgtggaggggcggtcactggccaccacagtgacttacaattacctccctttccacagccgaatcttccatcccggaggccccaaggcactttggaatcctactgcacaaacctcacggcgcccctcaaggggagttgcggttgagatttgggcaatagcagaactaggttccctatattcaccatctttctctctctctttttttttttttttttttttttgagacggagtctagctctgtcacttaggctggagtgcagtggcacgatctcggctcactgctacctccgcctcccgggttcaatcgattctcctgcctcagcctcccgagtagctgagattacaggtgcccaccaccaagcccagctaatttttgtatttttaacagagacagggatttactgtgttggccagactggtctcgaactcgtgacattgtgatctacccgcctcggcctcccaaagtgctcagattacaagcgtgagcccatctttctcttctttagggtggtgtgcatgcatcccctctgcctggaatacccttctttcggaattcagtttagaggtcacttcctccaggaaagcttccttgatgttctccccactcagagctggtcaggtgatcctcctccaggggtccacatttccctctacctctctcactgtgacccctgccacttagtattaaaatcacctatcaacatgtccttggcgaggtaagctccccgagggccaacccactgctcctgctcctcaagttccagacaacagcaggtgctcaattaatatatggtaaatgaatgaataaaggggctgaaagggcaaaaaaagaaagcgaaaagcaggaaagaggaaggtctggccttgggccatttgggagctccctctccttgcgatgctgacaatggggccccctctggagccacgggaaaagcaggagccccctgacttcccgacaggatacaccaggaaaagagtccatcgaccataccaagcctttactaaacatggacagggccagctcccccatcggtgcaggaaggaggacatgagagaaacagtcctggctcctacttagatgacacagaagccctccccagcaccaccgctcacagtgttctttctcccagtctgcttgtccctgtggcgtgtcctgcacagcgggtactcgggagtcagtgttccgttctccatttgcttaagctgcccgatttctcccgagataacttccccacacaaagctgatctgtataattaagtctgtctcattcgctactttctttcgcatgtacacgtgtctggctgagtggccctaggggcgccaaacattttactaataacatctcctttaccacactgggaaatcccccaaggcatgaactgtgtatggttcccccctgaacccctcaaacccagcaaaggacctggtgtccaggagggtacttgggaagttgccattggatatacaactgcccaagccaactgcactggggccaccagaggcccatgtcccactcgtgaaaatagacaccacgaggtaacattcattttccacctccccaaatcactgcccttcccctccagcagggctcaaaagagctgtggctacccgagaatgtcaggtaaagacaaagaccagcccctccttcagccagtgacatgtgccagccctggtgtgggccctgctcagtcccagactccccagggagctcacatcgatcagatcagagacatcatggatgtagtatttgcttatagctgcgttggtggctgccagattgagcaagtagtcattccgggcctttgtgcatttcagcttgttctcagagtacttggcctgcctctggaagaagaaaagagtagatgtaagagcaagccatttaagaggacggggtttgtgattttctattccttttttttttttttttgagacagggtgttgctctgtcacccaggtgagagtgcagtggtgtgatcatagctcacttcagccttaactcctggactcaagcaatcctcccacctcagcctcccgagtagctgggactatagatgcatgccatcacacctggctagtttttgtttttgtttttcaagttttttagagatggtggggtctcactatgttgcccaggctgatctggaactcctggcctcaagccatcctcccaccttagcctcccaagtgttgggattataggcgtgagccaccatgcccggcccagtggttttttttttctttatagtagctgcctgccacccaagccctgcacagccacacctatggaagacctccatctgctagatgagtaagggctggacctggactcaggcagctccccttacacctgcaccttgcacctgcacagccgatgaggacactagatgagcagcagcctctgacggtccttgctagggtggggtgtaaataagatccctggccaggagcgttggcctgtaatcccaacactttgggaggctgaggcaggcatatcacctgaggttaggagagcaagaccagcctggccaacagggcaaaaccccatctctactaaaaatacaaaaattagctgggtgtggtggcatgcacctatagtcccagctacttggaaggctgagatgggagaatcatttgaacccaggaggcagaggttgcagtaagcagagattgcaccactgcactccaggtctaggtgacagagggagactccgtctcaatcaatcaatcaataagacccctacccagcaccctccagtgatgtctcaaactgctgctcgcacctgagaagccctccatggccttgtcccatccacttctcaagctccaccttcccccaggctccccctcatttgctcagcctccttggtccatcctttaagaggcaaaattcattcctgtctcaaggccctcaaactcatggttccctcagccttggcccaaggtctcaaggccagattggctttcgatgacaagctcatctacctctcccactccctctgcccacccctgcccggctcttttcttaataagcacttccaccacctgaaactgtatttttttctacccttttatttacttgttgattgtcagtgatctcccattagaaaataagtggggttagggacttgatctgctttgttcattgctaggtctggagcgcccagaactgtccctgcacaaggtcattttcagtcattttcagtgactggaggacaggagggagggaggatgactggatgggagaggtggggtggggcagccagagccgcccatctcagcagggacccaattgccccccagggagctgctcctggctaagccagcctgggaatggagcaggaaagaggaagtgggctggagagctgtcccctgctcctttcagactgatgagtcccattgctgtgtaaaaagtcaggtctctgtaaataaatggtttttctcctttgcctagacattcttacaccttcctattccacagtgagttctcatccttttaattctcttcagagatctctaacttttccccagggtcctggcagttacatcctacgccagccatgcacctgaccccccacagagagttttgatattcttggcctatttccagtggacaactatgaccatgaccctgagaccattttttagcccttcatagactcataaaatgttatacctagaaaggatgttaaaggtattttcattaaactcatctattttatagatgaggaaatgagaactggagagaagtggcttgcccaagagccaagtagctaatcgaaccaaaaatacaactctgaactaaaaatcggcctctggacttccagtcagcactcactctacctctctccttctccctatgttgtagtcctatcattccctgcttggttattttattttatttttatttatttttactgtattcacagagtcacacaaccatcatcattatctaactttagaatattttcatcaccccagaaagaaatgctgcacccattcacagtcactccccattttcctcttctttagcccctggaaaccaatcatctattttctatttccatagatttgtctatgctggacatttcataaatgtagttgcacaatatgtggtcttccgtgactgacttctttcatttagcatactgttttcaaggttcatccatgttgcagcatttgtcagtacttcattccttttcatggctgaataatattccatcacatggatataccacattttattcaaccatccatcagcagatgaacatctgagtcatttccatcttttggctattaagaataatgctgctattcatgtacaagtctttgaatggacatatgtttttatttttcttgggtggatacctaggaataaaattgttgagtcacatggtaacttagtctatgtttaacatttagactgctttccaaagtgatagaatcactgtacattccctttagtagtgtgtgaagattccaatttatccacattctcaccaatacttcctatagtctgcctttttaattctagctatccctgtgggtatgaagtgatagttcactgagtttgatttgcatttctttaatcactaataatagagacaatcttttttttttttttttttttttttttgagacagggtcttactctgttgcccaggctggagtgcagtgatgtgatcatggctcactgcagccttgacctccctcaggtaatcctcctacctcagcctcccaagtggctgggactacaggcacatgccaccacacctgcctaatttttctattttttgtagagatagggttctgccatgttgcccaacctggtctcgaactcctgggctcaaactatctgaccaccttggcctcccaaagtgttaggattacaggtgtgaaccaccatgcctggcccagacaatcttttcatgtacttattggccactcatacatgtttttttaagagcaacatctattcaaattctttgccttttttttttcataaatagagatggaattttgccattttacccaggctggtctcgaactcctgggctcaaacgatcctcccgccttggcctcccaaagtgctgatattacaggcatgagccactgtggccagccctacagcactgtttttaactaaatctgtttcgagtttcacaattctcagcccagtgctctgggcaattgatcagagttgacatgagagatgagacgaatttgccactcctatcagatttgaaaactgcagctcagagaggtgttgtaaacgtggcattttcaaaacccagctcatttgactccaaagctagaattcctcccaccacaccctactaaaggacttttccagaatcaatacacagggattctaactctctcatctttgaattggcaatggcaattttggaatgagcccttcaccagctttccaggtgctggtccctcttgttgagacacattcagcaatcagttcccacctcaccccccgcccctacccttggccatcaaattggcctctggaacaagcccctgctcccgctaatgccttgtgattccagctcatctgagaaggtgcttgctgggtgtgaatctcgtcacagttcagctttcttgtgagttgagcacctcgtctgcctgctgaccttagcactaagccaggcctaaccagtgttagcacgggcatgcctggctccgcttccactaggacaccgatctccaaaagaggagatgctggctacattgtcccatcccccctacccaccaccaccccactgggatgcaggggaataagggggaaggctaaggctgtccgccaagaccatggccctcccctttgtgccctgtccccaatcgctcccagcccagggcccccactcaccttctccttcatcttctcaatcttcttcacagagctgcggcgctggggccggtcctcgtgccggagcaggttcatgctgaggtctcctgacttattgaactgcttctcctcctgcttctcagcctccttcagcttgctttccgcactgatgctctctgcatggtacatgtggtaggttttcatgacctgggggtgcacaagtaggggaaatcagcagccagctatggcccagcacggccctccctgttactcctggctccataccaagttctacactctagctggccactgccctggtcccaaaacacactctgggcacctgccttcctttacttttgcacagactctctgaggactggatatgatgatgatggtcattaccatcaccatcatcatcaacaacaacatcattaagccctaactaagagccaggcatgggctagtaaagaggaaattaaaaaataataataaataaataaataaataaataaataaggaggaaatttaaaagggtaaccgtagctccaagcatctggggactgtcagacgtgacaaggcaagcctggcccttgctcagctgtcctctctagccctgccagtagtgactgtggcatccctccgtctcctcccagtgccgcggggaaagcccctcctcccacacccatgggaattgaatgggaaacatccttcttacacacaaatcattttctcagctgtttcctgaagtacaatgggctgcaaatggctctgtacccaaaatgagtaatattaagtaacccaatagatattctatgctctctggaataaattcatccttgcctataaaaacaattcctataaagcaaattgcactttgctactctacttccataataaaaaaaatggatattgttattacaggggaaatttctgagccagaagaaattctagacatcatctaatccaacaaccttctagtttgacaaacagggaaactgaggctcggaggtgcaaagtatcagtgcagagatgccagactttacatccatgtatccaggaccacaagcaaaatatagaacttccactgcaccagaaagatccctcatggccctttgcagccaatccctgaccccaccccagccccaatcatagatttgccttctgtcactgtagattggttttgtgtgttctagaatccagttccatggaatcatacaatataaactcctttggatcagccctcttttcattcagcataacttttctgagattcactgatggtgccgtacatatcagaacttcttttttatggctaagtattccattgtatggctatgccacaatctgtttacttagtcatatgtccacagctacttgagatgtttatagtttttagctatttttgaataaggctgctatgaatacttatgtacatttctttgtgtggacatgtattttgatttttcttaggtaaatacccaggcgtgggatggagggtcatatggtaaatatatatttaatcatattggaaatctggcctctcacttttaatccaccactttttctaccagatcatcctagattgtctgtatcattttttcataaatagagacggggttttgccatgttgtccaagctcgtctcaaactcctgggctcaagtgatcctcctgcctcagcctcccaaagtgctggtattataggtgtgaaccaccacacccagcccttaatgaatttttttaattcattaccattttctgagcaggcatacttttagtagcctgaacactggctgggctgctccataccaacagcatttttactggtccccaaccagaaatgtacttttcttctgcaatgccaagtgtatgatcatctttctatgctaagaaacaaagaaacttctggaatccatggctcctgggccttgttcattctcttctgtggcttggattactgtaacagctaacagagccaaggcttcccccaggaatgaaacgtgctcctatctaaccaagccctgtaagtcagagaactcagaatgaattcctggccaaccctaaaatcttattccttgtcatttgaagtgctgtgaagtgcgtttattagaatgaggaattctgtgactttattttttctttttgagacagagtttcactcttgttgcccaggctggagtgcagtagcatgatcttggctcactgcaacctccacctcctgggttcaagtgattctcctgcctcagcctcctgagtagctgagattacaggcacccgccacaatgcccggctaatgtttatattttagtagagatggggtttcaccgtgttggtcaatctggtcttgatctcctgacctcaggtgatcctcccgccttgacctcccaaagtgttaagattacaggcgtgagccaccacgcccaggctctgtgacttttatcattaaatcacagcattgattcattgttcagaaagttgcctttgccactggccaggagtcaatgtggcaacatatattgtagatcatggaaggtaagaatatggacaagtgtctgggctgaatcctgatggtcccactccttagctgtgtgaccttggacaagtcacacaacctctctgacctctgcttcctcgtctgtaaaaatgggataaaaatttacttcctatgcttgttatgagcactaaatgagttaatttctgtaaagtgctgagaacaataccttccacatagtaagagccatggaggtatctatcagatgctaccaccaccaccaccaccatcatcatcattattatccctgatttgggctcagggtttaagaacctgaaacatgctcacttggaaatgcttacaagctctggagaacattaactaatgtgaaaaaaaatatatttttatgccatgtttctcccttcttccttcatcctaaaaatcccccaaacttggaaaacaatacatggatttaaaatgcagtcaacttttcttcatgggtcttggtggaaagacggcttctctgcgttccgtccatttttgctcatttgcgatctccctaagactccaaaaaacccccttcttgctgatttcatcctctgtgtatgccagttccaccaagatcacatccaaataactcaatggaccagaatatgtgccatattgatgcgttctcgacatctagtggccaaaaggggtgactgcagacttgcagataatcaaagcaggcgcctattttgatgatcttcatgccttggttaaaaggacactggggcctgtcaggggaggcggcgggagggagagcatcaggataaatagctaacgcatgtggggcttaatgcctaggtgatgggcctataggtgcagcaaaccacgatggcacacgtttacctatgtaacaaacctgcgtgtcctgcacatgtatcctggaacttaaaataaaaataaaataaatgagtccattgagttatttggatatggtcttggtggaactggcatacagagaggatgaaatcagcaagaagggggtttctaggagttttagggagattacaaatgagcaaaaatggatggaatgtaaagaagaaataaaataaaataggtgtggctaaagtgtgagaacgcctgctgcggctgtctccaggaccccaccttcccccttctcgacatgtccctccacatccacagacaaccctgggttctttgcctcaccaccatattgctggtgtttttcatgtctggatcccatccccgtctgcgttcaatgattcctgctacatctcctttttctattttggcttctgagtctgcttgcctcgccacgaatctgtcatctgtgctgggtagttcaggggaaaagagagcctttctatttacagctagatcttcctgtccaatcaccatgcatccatccactctctcaaggtcaacagcccagctgggtgttctcaattcccacatatcctttgcctagttttctttttttattttctctccctttacatcattttctactcttcttgagccacagagtactcttcctgccctccgacaggccaaacttcccagacagcctctaaacttcattccaaaaatcccatgcttggagaagacaacccaagtaccctggggccaaactccctgtgatctactcgattcctgattccaagaataacagtgaactccactgccgagggtgacttatgacagacagctgccaccaaagagttcacctggaagtttctccaaaatgactctatttgtacccagaatcctctagatgtttcttttatttaattacctgatacatgggcttcagcatgaatggtccttagctcaatagactagaacagttagctcaatattgctagtccaggatgcattaaataatatttaaccttatctattgcttcaaagtttgcaaacctccttccaggagcccttctagtaaaggagcatttcaatgagtcctttccctaatcctgggaggtagtgtgatgacagtaacaacaatgatagcagctagcatctattgagcacttactacttgccaggccttgctttatgcactttacctatattaactcatttatttctcaaaaaaaccctatgagataggcatcctatgatccctgctttacagatgagaaaaccatggcccagaataggtcagtaagtttctctaggtgaaaagctggtaagtggagtcagggttcaaagccaaggtggctgaccccagagcctgggcctactgaacacatggttgttttgctttccttgtacccctttctcaactgtaaaacaggggtgaaaggctcctccagcccactggaattcgggagacttggttttgagactcagccctcccactacttgctgggtagctgtggagaggtgtgtcctctccgtgtccgcctggtgaagatcagaagggggtagatggggaaagtgctgtcaactgcaaattatcaagtgaccaactgccagcagcagtgtgcccagggctgggaaggggcagaggtggatgcaggagctcagctgaggccaagttcctgaactggggatgtctgaagggcccctcagaggtacccatccacttgatgccagggaagggattcactttccagccctccagactctattcagggagtctagggaaggacttcgtagggatgtgtcagttaagaccactgttcttggaccaagttcagttgcatgtgttctcagaataaaaggtcctccataaatcttggtgtcctagcccctcacttgaggagatggaggctcaaaagtagcaagagcgggctgggcgcggtggctcatgcctgtaatcccagccctttgggaggccaaggcgggcagatcacaagatcaggagtttgagaccagcctggccaacatagtgaaaccctgtctctactaaaaatacaaaaatcagccaggcgtggtggtgggcccctgtactcctagctactcaggaggctgaggcaggagaatagcttgaacccaggaggcagaggttgcagtgagccgagattgtgccactgcactccagcctgggcgacagagcgagactccatctcaaaaaaaaagaaagaaagaaagaaaagaaatagcaagagtgctgtccaatgtcacacaaaaagccaggcagagctgggactgcaggccaggtctgtttaccgctaagcattgcctcttctggtcatcacactgccttttgctttgcacacattgccttttgcctcttccctgatcctcagattctgaaaacagcaaagtgttatctgtaccatctttcagcccctcatttaaatgcaaaagaaggcaaacagaatctggaagttgacagcatccataaagggacacctgaagcaggataaggatcagttgttagaaaacagcttctcaatgatgcagtccctgtgtgcttcctccaccctgcagacagggctgtccctgggcacagtggctcactgcttccagcatttgtgtatgggtgaaaccctaggccagtgcatgactgagacctccttgaaggaaaagagaagcaaagtcctgaggccagggtcttgttcgtgatagtattctctgtaccagagcagagcctggtacccagcaagtatcaacacatatttgcatgaatgaatgactggctgggctggctggatcaacagatcaaaagatcagtggatcagtgaatatggctgaatggatgggtagatggatggatggacagatgaacagatgggtgggtgggtggataaatgcagggatgggtagatagatgggagaaaggaagagaagaaggcagggagagagggtaaaatgagggaggtacagttctattgcctgtgttctgctgagcatacttggaagtagggagattgctgtaccatcaatcattaaatatttattgagcagttcattatgtgccaggtactatgctaggcaatactacagtgtggaagacatgcaggtcgccgccctcataggatccaaactgtagtagagatacaggcaattacacaagtgatgatcacatggtgggataagtacaatgatgaaggacgtactaggcaccataggaaggcttcccggaggaagtgacatctaaactgaacactgcaggaagagtagctgttagctgggtgagcagggcttgggatgggggtggagtgtcccagacaaagggagcagagtgagcattagcccaggggagcaggaggcaaacaggactggggagcagctgaaaggtggaagaacatcaggtatgtcaggtatgaacatcaggagcaccagccaatggaaccacttcctcattctccccaagggactcctcctcagtggacacctgttgtttttctctgcccagactcatccagtcttctttctttgggaatagccccctaattttattttgaggaaatcccccaaattcccctccactattctcagtacacgtggttcatgggagtttgacatcaccccacaatcctggggtgggcatgagaccctggcctggccaatccgtaaacttatgttcatctggccataggaagctcagctaggccaattagatgctaccctagggcttcactggaaacactgggaagggagtgttttctttccactggagggtggggagaggctaatgggaggagaatttgcagtgctagggaccatttttgtcaccacatgggagaagcctgccagatcatgaagtccacacagaggaaaacaaaccagaagtgggagagagactgattctcaaaggtggatggatggatggatggatggatggatggatggatggatggatggatggattggaaagagtggggaaggaaggtaggaagagaaggaaggagggaaaagggtaaaatgggggaggcatagttctactgcctctgatctagtgagtatattggcggggagaacagctacaccttcaattatcaaatatttatttatgtgtcaggtactataccaaatgcactacagtcaaaatacagtatagaagacagttggggtctctggcctcacagagtacacgccgtactggtgagacagacaaatcagtgtgtgagcccctggatccagttagacctgagctacatgttcatgtgattcaacagagtgtcatttttatctaagccagtttgcaccagattccagtcccttgccactaaacaaattgcaaaaggcagacttccttccctttcagcctccccaactacccatatcagtcctgatcccaaccggccaggctcagtgcagtgactcaggagcagtgctgactgggcggaggctccctccagcatcccgggtgctgcttcccaccgcgctaagtgctgctccttctgcccctctctgcacccaggaactgtccactgtcgatcagataccatctcttctctggcaccttcctgatactcagtagatttcatcaccccctcttccatgttcccacacactgtcatatccccactaaggcacctgtcatagtgtgcagccacatctcgtggtctggatatgctgatgatcaatacatgtattcttagtgaatgggtgtctgggcaggacagcagaaagagaagggaaggttacctagagggaaacctcttccattctgcttaggaccagttccgtccctggatgacactgtgcacacaccctggctggcaggctgtgacagccccgcagagctgccctgccctaagtctgagccaggaccctggtctcccttccagggcacagtggcatgaagatcaatgcccggcaggagcctcagtattcctcaaactccacaccttcatcccacagacgggggaaaccgagtgtcagagccccactatctggcactgggtcagtgttgccacttgtgttagcaaggtgactttcggtgtcatgggaaggaaacactgccaaactggacactagtaacacagcaaccgaggtgacatagggctggaggaagagtcaggagatatgcttctctctgtgtatcttcttgcattgtttactgtactgttcttcacccctttcagctctctgaggatcctttgattacatcaggaggaaaaaacagtcgtgcccacacatcttcaaagcttctcgcctgctgctctggcaggcacaagcttgaatatacaacactgcttgattttcacttaactaacagaacgcttctatttataccaaactgtgtttcatctgctaatgtgaagtatcatttccttccacaataaatgcaggttcgtagtttattttttaactttaaattttaattctttttaagacggggtcttactctgtcccccaggctggagtgcagtggtgcaatcacagctcactgcagtcttcacctcccaagctcaggtaatcctcccacctcaacctcccgggtagctgcgactataggtacccgctaacatgccttgctaattttttgtattttttgtagagagagggttttgccacgttgcccaggctggtcttgaactcctaggctcaagcgatctgcctgacttggcctcccaaagtgccgggattacaggcgtgagccaagcccagcccagataagtagtttctatatagtcatataaatagtttaatgtatttatatcactagtgtaggggagcgcttaagcactcggagtctggagcaggttctgctgtttcccctctgggcaaccctgagctggccacctgggctctctgtgcctcagatttctcatccctaagacgggcgtggtcataatgccacctacctcaaagggttacgatgaggatgaaatggatcggtacatgtaaagcatttagaccagcccctggccttcaacaagcactgtacatgattggaggctctagttattcttgagatgaaacaatctccaaaatatacctatgaacgcaaagcaagatgcagaatagtaagtacagttgtcaccacttgcataaaacaggaatgtgtgggatatgcccaaacgtgtgtgctgattgatggctaaaaggtctctggaaggagacatggctaactggacactaataacctagtaactgagattatacggggatggagaaagagtcaggagacatgcttcttcctgggtaccttcttttattgtttaattactgtcttatttttttaaccaagtgtatgtatcttctatttctaaatttaaatattaaacaatttttttaaaggaaagtcatccagctcaagtatggagccagcatcacagagagcaggcccggagaatgggaaacgaaggaggaggtggctgcacgttttccagcgaaacattcttagggctctggctggcccagtggagatggggaatggagaagaaagattccaaactatgtaggaaaaatatttatgcctcattctttcataaaagacacaatgactcaggactcaggtttgctaggcactgggctatactctatgacaatcactctccccagaataatccagacaaatgaactggcagcagccccatgttccagggagggactgggctcagggagtttgtgtggcagggccttcaagttaggtccagctgactctaaaacctgtgctcttccagcacgcagggctgctttccactaattaactaacactgggggaacttaaaaagggaggggaggtcaacttaaagaaaaatattcagtaaatgacagagggcccaaagataggatgaagctgtggggctgtacctgaatgtcatcctagaaagacacgcagtgagcccagggtggagctgggaccagaactcaggctcctgggctcccagtctcagctctctccaccatccccatctctgagggaagtcatgaggagggagacacctttgccaagatttgcctgttggcccagagttgatgtcacatccctgagcccatacacaatcaatcaaggcttgaacaagtcaaaggtagagtgattcatggctccagttagggtctacctgtgaccagctgctactgggtatgaatggacactcctcaggccctccccacatggcaaagaacaaagtcactgggcctctcctgcagccctgggcttggaaggccagcccacagtttggagcagagctgctgaacacagaggaagagacaggtggggggacactggacgttcactagttactgacacacatgcatttcataatatagaaatatattgaaaatctgaacacatttttagccgaacagtgaaaacacagtggggcttacagtttgtgagttgttttgttttgatttgcctcttctagaaggattgccatactggtccacgttctttacctctgccctttttttctcccaggccaatacatgaacaagaactatattgtgttgggctgatgggagttcgagggaaaagaagtggagtgggatatatgtgtgcgcacgcttgcatatatgtgtatgtacatacaagcacgtgaatgtgcatatgtgctagtgtgtggtgcatgtcaaactgcacatgcatgtatgcaagtgtgtgtgtgtgtgtgcgcgcgcacatatgtgcataaacacccatgctagcatgttttaaagaggagggtgcctcaaggtgctaagggctgagcagataaggactgggtgataaggactaggcttattgagtgagtgaatgaataaatgaatgaacaaaatgcctggccttgcagtctcctctgcatccttcctagccccagatagagacaagccttttctctaaagcaagtgatgggtggcctttagcatttatctccaccatcattataccctgtaggacccccggaacagaccaccaccacctcccttacagaactttaagaagaaaaaaagtggagtttactggaaaatcctttctctgcattatttgttcctcagtgactgtggtaatgaccctagggctgagggaggagggggactgtagacttgtataaccaggcatggtaactagaaagtgctcaaaagaaatccctagcaatgaagcatgaatttggggcacatagtgccgccagcagctgggtggctggagtgaactgtttgcaaagaggattgtgatcattactggcatggctgcaggcatggccctttgcattgtgactctgtaaggggagggggccttgcttttctaacccaggactctgggcttggctgtgtaacttgctttggccaatgggatattagcaaatatgacacaagcagaagcttgaaaagtgcttgcacattgggatttgctcactttgggctctttttctttttttaattgaccagaaaactgcagccacaggagtggccccagttgaaccctgcccaaattgctgacccacagaatcacgagcacagaaaattgtggttgttctaagtcacagagtttcgaggtagtttgttacacagcaactgatagctgaaacaaaggctttaaataagtcacttctctgtgcctccatttctttatctgtaaaaatgtaagagtgttaattaaataatatatataaaatacctaatacagagtgagatgcatcataagcactcatgaagtggctacagatgttaggatcatccctgtttggcaacaaagaggagagccaacgaggttaattgatttggccaagctcgtaagtggtgcagcaggaattcaaatccagatctgtctgtgatcagtgtgcactgctgtgatcctgcattgccttccctgttgagaactccttctctcttcctctcattccctctgcttctttaattcctacccatccaaaggcaccaagctcaaagctcaccctggaacacagtagcccacttttctgaatctttttccttcttgttctccctccctccctccctcctcctctcaacccatctctcacacatgtgcatctccctcaactaatacacacccatctcctcctatgtgtgtgcatggttggccaggggctctgggcacactgtggggaacaaagtccagccccacagagctcacaggcgagttacacagccaagcccagaggtacctcctctgtgagcccacatgtccagcacatactaggctctgacttgtgttgtagcaacagttcacacactactctttttatattattattattattatactttaaattctagggtacatatgcacaacgtgcaggtttgttacgtaggtatacatgtgccatgttggtttgctgcacccatcaactcgtcatttacattaggtatatctcgtaatgctatcgctcccccagtcccccaccccctccccctccgacaagccccagtggttcacacactactcttatctctctgcccagattccaaactccttaggagtaagaccagtttctttcatgtattcatccctccctcctccctcctttgcttcagtgagcaccctggaagcaccaaggatgtacaagactctgacagagacagactctgaatattcatgatcccccactgtgccctactgcagctctgggcccacagcatgtggccccaaatgcttgaatttaactgagtttctgagtaactactaaagactcagtgtgcaggcaacaaatgatcgaatttaactgagtttctgagtaactactgaagactcagtgtgcagtcaacaaatgatcttcacaaggggtgtgctggcaccatgaggatcccactcttccaaaggagagagctaggacccttcttcctccactagcttctggtgaccctcaccaggctgctgtggaaatggcaaggcatggcttgtcctgttggggcctcagccaccctgcctggcctgtgtctccaataccagcggcatttctgtccagccatcctgccctgcagccagcacagggaggtgtgcatggagcacctgctggattcaggccactgtgctgggcactgggaccttgaaggacacagagagatgccactgtcctcctgatctctgaccatcacctggccttgtccagtctacaaaccacagaaaggtgaccatccctgtttgtcacaggtgaaactgacaagtgaagggacttgcccaaggccacacagctgggttcaaatggagcctttgggcctttcatgcagtgtttctcagccaagacctgactcccagggagtttatactccaacatgttgggagacgggatatagacaataaagatacaagagattttggtacatctgccataggaacttgaagccgagaggtaataacattctgaaggtggcgaggtttggtctgagtttgaaaaatgagcatgacactaacaggtaggtatagacagcagggattgcagggaaaaagcagcagagggggaaggtatttggtgtaaatagagggcaccaagaagaggagccccgctggaggtcacagcaaaagtaagagacctaggtgggaatgaatgggggggtcccaggacattggggctaagttgttttgacactgtggaggaaagtgatccattcaaagtggagcctgaggaacataaaaaggacctagactggggagcacctggtctagccaaactcgctgcagaattctgagcacgacaatcccattcggtttaccaggcttgcattatttatcaccacccttccccccaccgtgagtatgtacaacagcctacctcacacccatcaaggaggagccaatgatagtgatgatgatgatagtgacactcagaacttctggtacagaatgctctttttttctctatgttctaagcatccattgcatacaggatctcctcgaattctcacagggacgtgcactaagcaggtactagtatttctacttaacacctggatttgaacccagatctctggcttcaaaatctgtgccttaacccagcaggctgttctgccccccagtgaccagctgatgcaaagcaatatgcattctcaagcagcaattcttcctttaccctaagaatgactcaactaaaaactacccacaactcaagttttgcttcttaatttggaatcacagaattaaaagtttcaacttttatctaagaactctcagccccgttttactgattgggagactgaggcccaggaaaaaaaatgccttgcctagagttccgtagcttgttgggatctgaggcaggctttctgacctgaggtccaggccctcccgcaaaggctctcagtgcctctgaggaatttaccacctgctggccacacaggatataaacacagaaagataataaaaccaaacagaaggggcttctcacagactgctgttctttcccctcataccagggattttcaaatacaattttaccagcagattctccccaacacacaaacaaacacacttttcatgaaatgctatatagggcacctatctatttaaaacataaccattcttctctgttctgattgggtaggattgaggggcctggagctctacctgctgggtctacccaccccactccccatatctctccatggggtccccacattcctcttgaggaagccgtaggctcctcaaagcacagtctgaaagttcctgcatcatcacctcatgtgtttgtgtccccatttgctcaccttcttggattctaaaactcatctcaagcacagttagatgttgactccaagcaggtaacaaagtcagccgtggaccacactgtgatgttatgaaactatgccttggagatggcaatgcaggctcaccccatgacctcccgtgatcctcggaaccgtgctccattttgcagatgcacagactgagacccagacaaactgcccacctgcctatggtcctacagttggtaaggaggggcctctgctggagcctgtgctgcctcactccaaaactcacatccctgccttcaggagccttcacactcacactcccccggccttgactttgtgccctctgttcttgcaggtaacacgccccacagcggcaggtcgtttgaatctctcgtgaattttgacaaactagacaagcccaggccctgccccagatgtacagaatcagaagctggggctgtgagtcattacatcctgacacgatgacccactgtcactcagcataaaacgcagcaaaaaaggcctggggtcattccagacctctgttttgcttccctccagctctggtgatgaagacagagacccaatcccaaaacagcagtgagcctgggcagaacttactgtgtagagctcattggtcaccttcaggagctcctcgtgcatctgcaggccaatctccttgctctggaatgtggaagaacaaatgtcagcgggggagaagtttgctggctacatttaccaatctcttttcaaaagcgaaaggtcaggaatgtttcgggtggggtcagaaggggtacagaaatcagcataaatttcattgatctacaacaacataaattcctcaactatgtccatgaaacaaacccacagagagaggttccttgcagatgggattccctgatcatatgagttggagaaccctacacatcatttccctaccacagtgactcacagtgacagtagcatattaaagatgtggggaagccccacagaatttttctttaattctacgtgtactaagctggtatgaccagggtctgagctccttgcacaatcctcatgaatggctacagagtggggttccatagaacacactttgagaaacaatgatttggcatcccaattcctcttgagagtaaatgataattctcaagtcctccaggaaaaatctcaggtcctccagaatatgagtccccagcctccaggccacagatcagtccatggcccactaagaaccaggccacacagcaggaggtgagcggtgggtgagcgggcattaccatctgagctcctgtcagatcagtggtggcattagattctcatacgtcctcgaaccctggtgtgaactgcgcatgtgggggatctaggttgcacgctccttatgaaaatctaatgcaggatgatctgtcactgtctcccatcacccccagatgaaaccatgtagttgcaggaaaacaagctcagggctcagggctcaaactgattctacattacagtgagttgcataattatttcattatatattacaatgcaataatacagaaatgaaatacacaataaatataatgtgcttcaatcatcccgaaaccatcgccccaccctggtccatggaaaaattgtcttccacaaaactggtccctggtgcaaaaaaggttggggaccactgctccagaagatgtttcctgaaggcttgtcttccttgactgagaatcagcagctggcacccacttggacatcgccttcctagctttcaaggactggttacaacagatgccctaaccttagtttgactccaaatttcagctcagccctccccagtgctggtcccctggtctgcctaatctcatcttaccattgcctagatcctgacacagtcgcaagtccacactctcaagatgtctcttccaatgaggaacaggagaagtacaggttggcagaaaggcctctggggcacaaggcaaaagatctagcttctcatttccactgttggctgtgtggccttggagaatcacttccccctttgagcctcagctacctcacctatcaaataaaaagcttaaactaaaacaatactttccaaagcatggtctgaagatcactgctagatgctatgctaaaaagggggagcaggggcttctaagactacatgcatttgagaaaaagctaattgaacaaaggtagacaagttttcttaatgcaggacttctcagtgcctttcatgtccttccttgcatggagactttctaagaaggaggtatagtctgtagtttcattgaccacagtcctatttccatgaagtggctttcatgatatttaaggacacaattcagaaaacaatgagaaaattatctctaggttccatgcagcttgaagagtctagaattctttgttattttatttatgattgtgattatgattttggtaaatattctctgctataatctgaatgtttgtgtctccctcaaaattcctattttgaaatcctaacccccaatgtgatggtattaggaggtgacgtctttgggaggtgattaggtcataagggtggagccctcaggaatgggattagtgcctgatatggtttgaacctctgttcctgccaaatctcatgctgaaatgtaattctcagcattggaggcagagcctggcaggagatgtttgcatcatgggggtgaacggctcagtgacatccccttggtgtattctgaagtgtgtggcacctgcgcctctcactctctctctgttgctcccactcctgccttgtgaaatgcctgctccaccctcaccttctaccatgattggaagcttcctgagatctcaccaggagcagatgcctgtgctatgcttcctgtacagcctgcagaactgtgagccaattaaacctcttttctttacaaattacccggcctcaggtattcctttacagcaatgtaagaacagactaatacaatgcccttaaagagacccaagacagctaccttgccccttccaccatgtgaagacacagcaagagattgccctctatgaaccaggaagcaagctctcaccagacatcaaatctgtcagtgtcttgctcttagacttcccagcctctagaactgtgagaaatacatttctgttgtttataagtcacccagtctacggtattttgttatagacacctaaaaggaccaagacattctccctgtttgccaagaccatcgtgttgagtttctgtatcgaaaatgggagccgtgatcttggctccctgagcagctgcagcctcctgctcttcctcccagttccttcagcctcatagctggaccagctgctaatgggcaaagaacagccttcctctcacccttgcagaggtgagaagcctctgaatccagtggtagctcatgaaggcttaatatcagaatgatgccttctcaggctccttctcctcaccccccacagccctttctctcagcttccgggcctggcttgccaagaatcacccctctgaaggtggtctctgcttgtgccagaccccttaacagacagcagaaacctcggaggcaattccagagacctatttacacctccctccagcttcgagagggtgtggagaaccttctgtgcagagctcactggggaccttcaacagtgtcctgtgatttctgtactggtgctctatgaacccaattagctatccccatttcctattctccatgactctctcaagtgaacaatcagtgcctcagtttcccctgtggcccctccccctgatgtttccccatcactgctgactccagattctctgacactctccagtggcctcctcttggtcctcaaactccccaacacctttgacacccaagaccctatttcttatgtgtttatttttatgatctttttacataggtaataaaggcacatggttaaagaaattctaacagccagcaggtaaaatggaaagaataagtctcccaaggctcctccttgtccagaggcaactgctacaaaaaatttcttctgatactttccagaaataatctatgaataaacaaacatatatttgcatatcatatgttctctcttaacacaaatgggagcatatcatacacacctttgcatcttttcacttaacgatatctctgagaaatttttccatcatgtaacttttatatccccttttttgcacagctgcttgggattccatataccagaggcatcataattaatttagccagctccttagggatggatatttacattgcctccagcatcttattatctcaaacattgatgctgtgaacatccttgtgtgctgtcactgtgcatatgggcagggaccccatcctagaggcagttctgctgggaagagtcctgtcttcagaattccctccagccttcccttcttggtccctgctgcagctggctccctcacacgctcctgactccagttcccacttcttggtgaccagaagccatgtcatcatctcccaggcctctctcctgggttctgtcctgcccaggagaccttcagcccaagctcaaagacctgtatccttagctgctgcaaaacagtatggtctagatgtcccctcatccccgcaaactcaaattatccaaaggtgaactgttcccccatcccttcaattttggtcaatgcgatagtatcttcctgggcttgtcaactggatacctaggagttctatttgatactttgtttaatctgtctttctcaatccaatctgttactgggtcctgcctgcaaactttccaattatttgttgtgagtagcaggcaagctggcctcccccacctcccaatatccattcttgcccttcctatttcctaagagagccatgaatttgcccaggaattcattcctccaggagagttcttcaagggaagctggaggccatcccaactcaagacggtggattctggtgtgtgttattagtccagaggtgagtatgtgacttaactggatggaagagaaagacttctgtggtcaaatggaaagttttagcttttctactgagtgctggcaaaaaaagaaaaaagaaagaaatgcatgtagcccagttgctaccagcaggcatcttagaaccaaaagaggaagcagacttaggattaatgaccttctggacaattgattggactgaagacccacagcctgcctcccagtgaacttccacttctgtagctttattgatcaagtcactttcagctggggttttctgttacttgcagccaaaagcatcctaagggattcagtcctattttccactaccagttcccgtagcaagcatatcatcaccacagacccagattcactttgttaagaggcacctcttaccaaaatccttagctcttgtgtctttgagtttacagtccattctgcaggcctgtgccagtgaaatttcctggaaatggacttatcctattcctccaaagcctcctcattgtctacagaatcaagccccagttccttagcttgaattttgagtcaagctaactctacacgactagcacaggcctgttgggcagcagaggggatgactttgggggccacagagacctggtttggaggcagggctttcagtcattcaacctattggcatcttagctttcctgactgtaaaatgagcaccttgttatgtcttctctgcacttgtaaatgatcttgtttgtttatttgttcattcatttatcatttgcttcccttgcttcaatgtcagccccatgagggcaaagagactttctctctggcaatgaatgctcaggcagacagccctcagctgagagcaccctacagggatggcctcagaggacacaatgacaccaagtatacacctccttctcagtgtagtccttgcccaaagactgatcattgtggggcagagaggtcagcctcttcctgtctcaactcagacagctctgaggagtcattccatcttcagaactccctgcttctacactgttggtgggagtgtaaattagttcaaccattgtggaagacagtgtggcaattcctcaaagatctaaagtgaaaaataccatttgacccagcaatcccattactgggtatatacccaaaggaaatataaattgttctactataaagacacatgcatgtgtatgttcattgcatcactattcacaatagcaaagacttggaatcaacccaaataccgatcaatgatagattagaaaaagaaaatatggtacatatataccatggaatactatgcagccataaaaaagaatgaaatcatgtcctttacagatatgaatgaagctggaagccattatacttagcaaactaacacagtaacagaaaaccaaataccacatattcttacttataagtgggagctaaataatgaaaacacattgatacatacagggaaaaacacacactggggcctatcggaggatggatggtgggaggagggagaggatcaggaaatataactaatggatacaaggctaaaaacctagatgataaaataattggtataacaaactcccatgacacacgtttacctatgtaacaaacctgtacatcctgtacatgtacctctgaactgaaaataaaaattttaaaaaagctccccaccaggctggctaggacttctagtaaggcagcctgcatcacagctcgaccttaccctgctgcctcacctgccttcccaagtggctgatccagagaacactccttcatcgttcccctagaagctaaattcagatgtcccagggtctgcttcctgggggacccaatctgcaatatcttatttccctattcctgcatttctgcaatgcaacagagtctgccacagagtacgtgctcattaaatatgtttgcttggccaggcatggtggctcgcacctgtaatcccagcactttgagagactgaggcaggcagatgacctgagcccaggattcgagaccagcctgggcaacatggtgaaaccctgtctctatcaaacatacaaaaaattagccaagtgtggtggcacacacctgtagtcccaagggaggctgagttgggaagatcatttaagcctggtaggtaggggttgcagggagctgagattgtgccactgcattccagcctgggtgacagaatgagactgtttcaaaaaaaaaaaaaaaaaaaaaccatatatacgtatgtgtgtatatatgtgggtgtgtatatgtgtgtgtgtatatatataggtacacacatatctacataaatatacacatatatacacccacatatacatatatgaaatacatattatatgtatctgtatattatatatgtatacatatatacacacacatctacacatatacatataatatgtattttatatgtatatatgtattacatatacatataatatgtattttatatgtatatatgtattacatatacatataatatacatatacatataggtatagtacatatgtatacatactatacacatatgtatattatggacaaggctaggaagttgcccagagaagggaatataaaattgaattttttagtaactcttcccttaagaatctcccagtttgctggggtagagtcaagaacacaattctaaggcaggaggcggaaagggccatacaagagtaaatatacatatacgtatattatgtatgcatatgtaacatacatatacatataaaatacacattatatgtatatgtgtatatatgtgtgtatatatatttatatgtgtgtgtgtatatatatgtgtttgctgaatgaatctatgaacgaatgaagtgacagttcctctaagacttagtttccttatctgtaaaagtgagatgatgtcatgggtctcatggagtccctgtgagcatgaaaagagataacacacatggcagcacctagcaccatatgaggcacagatgaagtcccggggaaatagcagtacaggctgaatcaacacccacgagatgccaaggacaaggctaggaagttgcccagagaagggaatataaaatcaaattttttagtaacttttcccttaagaatctcccagtttgctggggtagagtcaagaacacaattctaaggcaggaggcggaaagggccatacaagagtaaaggatggtgtgatgtgagatgaagtgatgaagaggattaaggggatacttccaaggccttcttagcttgcatgaatggctggagacagccttctaggcaggaggcacggagactggggatggtgaaaagactggttcatgaagagagaagctcggccacaggtgagcaggagataagcctgagacagaggttgggtcagatcacagaggcggatagagtacaggcttccttcagagcaggactgggaactactgagggttgttgagcagaagtttaagatgaccagggctacgcttcaggaaggtgaagacaccagtgaatggagggtgggatgaatgggaggagctggagatcgggttcttgtatctcttccccaggactgtaagccgccagagggaaccagcccaggcctctctgctcaccaactccccagtatcaagccctggactggccacagagtaaatgctcagcaaatactcaattgcacaagactcaaaggcgttctttctatttttggctggggttgattgggaagggaaatattctcaactatggttccagaaactactgaatgaggaactcaaaccaaacttttcaccaggaacaggaaacccaaaccctgtgatctccagcgacaccatacccagcccttaggaacctaagtgataatgtattcgctctcactgcccacattttccacactactttcatgcctgcaggggtcagggtggcaggctgcttccttcatgcacagggagtgtgtggacagtggaaaacggtgacatggggccaaggagggctcagccatggcagctatggctcctccagattgacggagcacagccctgtctttcacgctcaaataagccagtaaaatgaggctgaccaatctcaagagccagccatcatgaatgcagggaaccccagccctgcctggttcctttgcctctttgcctgtagctaaagccagttcagctcccttagggccaggcattctctgtcctgtgtataggatgtttaggagcatcactggcctccacccgtgagaggccagtagcattccctacccccaacccccagtgtgacaaccaaaattacctccagacattgccaggtgttccctgggggataaaactccccctctcctgcccaattgagaaatagtaccttggaacaaggcttccaagtggcagcttctctggcctgcagacatgttttgtttggccattcagtgctttcagagcatctggatgctttcccagtgttgaaaactcaggaaatttcctgcacaagtcctgattttcagcgtctctggtaattctagaagatccagcaatgccgagcccctgtttcaagtacggtggccccttcggtacgggcttgtgctactgctggtccaggtgaccacagtgcccagcttctccctccacccagccatgtcctccgtacagcccacagatgtattttagtttatgaccagacactggtgaggtctctcaggaaaggggtggcctcttatccctctgtggtccatgtttcactagctttgattccatttacacgggtgtttattgactacccagtatataccagcctaaactaggcactaacgacacaaagctgaatgagacacggtccctgctctcaagcctcccaaagtgctgggattacaggtatgagtcacggtgcctggccccatttgttgaatactatccaaagtcactcccatgtgttatctaatttaaatatttacaggaactgctataagtattcccacttgacagataagtggggtgggcggggggggggggggggctggaggctcagaatggctgagcaacttccccaaggttgcacagctagaaagtggcagagccaagattcatctttttgattggtctgactccaaagttggcactcatagcaacttactataatctgcttccttaggacctagttcaagatgcagacacacagtgaaaaaaagtcatcacaatgctgtaatggagatgagtccagaccacaaggaaagtacaaaggaggccctgccctccagacaccacctacctgtccaatgcactttcttatcacctgtgcagaaatctgcatctctgggccttgccccaacttacaagcagatctcatcctctttagctacacctgctctgctaggaataaaccagacatggtcatgtcttgcttctcccttcctccttctactaacagaagatgagatgttggtggaacaggctcctgtttgcctggccacacaagatcatcaggcaggggcagggtctgaccaggctccagctccttgccttcagtgatcagatcagagacaaacacgtgttccaggctaagccaatgaagaatcttctttgggacgtttctcataaccacactctcagatcatttctccccgggggttgctaaaagggtcttcaggagtcttgcactgcctgcagtaccaggcccactacggcagacagccagagcctttccgtccctagatctagtggtgcctaaacaagattcacctctggacttcatcagtttacaggatcccatacattttcatttttgcttatttgaaaaaatactaacgtaatccatgcttatgtcagtctgtagataccgaaatgaccactgaatgagacggccttctgaaaacgctccaccaagcatcagctttcaaagagttcctgcaaaaggactaatttcccaacaattagagcacacgcaccctaaagaccagatccctggctttaaagagtttcccacaatgccgattacgaagacctgcatacaaaaggagctctgtaaatgcctgtggatgagctcagcattgtgcagagcagtaggaaactagagaggagtaaaggatggtcacccataacccttatttctttgcacaaaaaaaaaaaatcaagtgaacattaattcatgtcaagatgaaatcagctgatgaagttcttgacatacacagctctgaattaaatcatttcctttgccatgaaaatcttgctctgtatgatttgattttgttttcaatgcagggatcatcatgctttttagggaaaactctcaaaaacctcacagtaggtcctaagactttatgagttacatttgaaaagctctatttcttttgttgttgtttttgtgagatggtgtcttgctttgtcacccaggctggagtgcagtggtgcaatctcagctcactgcaacctccatctcttgggttcaagggattctcctgcctcagcctcccaagtagctgggattactggcatgcaccaccacacctagctaatttttgtatttttagtagagacaggttttcaccatgttggccaggctggtcttgaactcctgacctcaggtgatccacccgcctcaacctcccaaagagctgggattacaggcatgagccaccatgcccagcctgaaaagctctgtttttaaagggcgtgtgtctatctccctcaaaataactcaaagacgggtcatttccagagctaatgtcattctctatgtctaaaaaaaaaataccatcttaaaatgttgagttttaagaacaagacctctcacacacacacacatacacacacacatacgccctttcatttctcccaatgacaccatcctaaacaatcttttagaaaattgtaatgcaggagtaagacaggtggcctttgttaactctcagttatccgtgctgggcctctcttctcctgtctcatcaaaccctgcgtcagccagccccctgtctctcttttctcactctttgcttgagtagatgttctcatgttgggttactcttagggacatttcatgattttcctaattctgggattcaaaaacaacaacaggaaacaaatacaactcaacaacaacaacaacaacaacaaaatcctttgtctctttcagtcctaaatgccgacagatcctacccacttcttctccacactctggcttgttttctcatcaaatcacaaaacttgagacccacagatgttccctatttaaatacatgatgtatgtaagcacgggccatctcccaaagtgattgtgtttttatttccaaaacaaaggcttaaaaggcatgtctcagaggatcaggcttctccagcctgtgctggaaggtccacgtacccctgaacacagcagctccaacagttaacggctcactcccattcctagccaggactttggttgccaataaccgggctatcggctctccatcccggcgccaacctctgctttcaaacatcctccttagccgggttcctgcccaccctctatcctgatccttgttattcttcccctctgcctcccattttcttcctttccctgctcctgaactcatccctgttctctttcccttcccacactaatttatgcctcctgttgctgaactccaaatgttgtcatctactcatttttcaagaatgcagattcgagtccttaggtcttcctactgttgccagggctggtatattggactgcaaagaagcaggaaggccttggaaccacctggacgttcttggcagtggtgagcctcactcatgcacacccgggagcccaggcatgcacggaggcagtgagtctagcaccgtggccagcatttcctttccctgcaattactcccaggcttactttgggaccctgtttatgctgaaagcttcactttcagaactgctttacgtaacaggcctgaggaagtccaaggatacctcggaatggttatgaaaagtgacctgacatggtcaggctaggagtttctggatctctacggataatactaaatattattaataatggtaatacttattaataataagtcttagtacaattactactaatactatgtgcttataatacataccattgtggataataacaataatagttattgtttcttgatgtcttagcacgtgccaagcacaatgctaactgctttatgagacaatacctcatgtaagcctaagatcagccctttattcgaggcactattgttgaacctattttgaagattagaacacagaggctcaggaagggtgagtaatttgcccaaggccatagagctagtgaatgtgatattctcaaccaagctgcctccactgggaaagttagctctctaagcacctttaaggtcttctttccctaaacatctaaaaataattctaaaacatgaaaactcttctgccttagtatagaaagcatattgatatttacaaggctctgctttagatcatcataaatgtcagataacatacagtgccccgtgccattttgcagaatctcctgtcatctgttactcaatcctgtcccaccctggcttccaagtcgaggtagctggggatggtgtggaaagttgggctgaatctctgtgggcccagaacatattcacatactcaggagtaatctttcttgattgtgtccctgatgtcgatgttttatatacatattctctctctctctctctctctaagagtcactcacagatcaggaactatggttgagggtaagatgagagcctgcatgcatgtcatgggaagtgacagggctgtcttcctgaaaagccagtatctatgaaaacctgaagctgctcagttttgagaggctttctccctctctacattatcttcaggatgactatggatgttgttaggcttatttgttggtttcaaaacattattgatcacttattactgctgaatcactgacttgagacatcactttaacctctttgtcattttataacctgatcttctgtttcacttgaattatttgtggacaggatgtaaatgaggtttgcattggcatttcaaaaatgtctctacctatgtattcacccatctatccacctctccacccatttgcccatccactcatatactcacccacccatccatttatccatccacccatctatccatcaacctacccatgcattcatccatcctttctttcatccatccatctacccatcaacccactcatccactcatccatccgttcattcatccatccatatacccatcaacccactcatccactcatccatccattcatccatccatccatccatcaacccactcatccattcatccatctttcctttccttccttcccattcctttatcaatctccctgatccagtccccattatctttcaccactaatatgtatacaagtgtatatgtataataacatgcaccgtccatccaaaatctcttttcaaagccattaaacataccatatcaaattaatcatccttcaacttgtctctgctcatttcactccccattcaagaaccttcaatggatctctaatgtctagaaaataaatcccagcttctcactctgacacccaaaggcttccttgacctgtctccaacctgactttccttatttttacctttaatttccattttccaacatctaaaacatgcagaaaaggagagcgaacaataacaaacacccaggaacacatcactcaaattagataacaaaattttgttatttttgcttcaaaattatttttaggaagcaaaatgttatagatacactagaaatgttcttggtctccttccttcctccctctttcctcaattataattctgacactgctgtgtattcttacacattctacatttgcatagctttatttcagccaggtgtctaaccatatgaaccatataaactattcatctgtgttccaagttttataaaaatatcatactgtaccttacttttttcacccaacattaagttttcaagctttattcacattgatacttgtagatctagctcctcttcactattgtataagattccatggtgcaactacccacaacctatttaaccatttccctagcgatggacatttaggttatttctctgtttctctattagaaacaccactgcagcaaacattctcatacagttttgtgtgtgagcagatacgctagaatatctttgggttatatttagaagtaaaattgttgggtcaaaaggtccataccccttccagcactgttactagatactgcctgattgttctctcaaggagctggacttatttacatgtttcctgggaacgcatgagggtcctgaggctccacattcttgccagcacttaggattgttttacctaccaactgggagtcagattgtatctcattttgttttattttaccttttcctgattaccagtaattgtgagcatcttttcttatatcactgaccattgaagtttcactttttaattttttttcttaggcagggtcttgctcggttgcccaggctggagtgcagtagtgtaatcatagctcactgcagcctcaacctcctgggctcaggagatcctcccacctcagcctcctgagtagctgagaccacaagcacacaccaccacacctggctaatttttttaacattattatctgtagagttggggtctccctatattgcccaggcttgtcttcaactcctggcctcaagcaatcctcccacctcagcctcccgaagtgctgagattacaggtgtgagccgcacctgtaatcccagaccatatccggcctaaatttcactttctgtggcttatcaatttttatcacttacctgtttctactgggttgtttttccttttcttattaatttgtaagagctgattttatattctgggtgttaaccttttattgattctgtgtatgccaaatatcttctccttgtcttggccatattttctatttatttattgttgtatggaagattttttatttttatatatgaaattaatcaatattttcttttatggtttgtgctttctaatgttttctttaagcagccttttcctacaccaaggttttaaatattaaatgtaatctacattgtctttccaaagtcttgaagtgttgctttttacctttagcaccttaagctttccagaataaatttctgtaaactaaggtaaaggccttatatttttccatatgaggaaagtatatgtttatgtatatataaaattagctcttacaaataataagaaaaggacaatcagttgaatcagccccatttactaagtagtcatccttttccctttgatctgtaatgcaccactgtcgtttaccaagtttccatttatggagggctctctttctgggctctcttctgtccaattgatcagtttgtctagccctgctctagtaatgtctgactatcactccagaggaagccttgatatctgataaggccaatcctccaacaaataccaaaaaatgtataaccttgcgaggtacagtggctcatgcctataattccagcactttgggaggctgagatgggaggattgcttgaggccaggagttcaaaaccagcctgggcaacaaagtgagaccctgtctgtacaaaaactggaaaaaaaaaattgcagggtgtggtggcatactcctgcagtcccagctactcagcaggctaaggcaagaggatttcttgagcccaggagttcgaggctgcagtgagctatgatcacaccactgcactccagcctgggcaacagagtgaaacccatctcaaaaaaacaaacaaacaaaacaaaacacaaaaaacaaaaataaatctttattgtcttaattttcttattatgatccaataaattcagaaactaaaaataagaaggctttagaaaaaaacctttgaaattatttttttaaaaacccaaacctaattctgaataatttgtagtcaaagaaatcataatgaaaattatgaaatatttatatatgaatgacaatgacagcatcacttatcaaaacttctgggatgcagctaatttgtagcctcaatggcatcaattttcaattattctcgttttctaatgtatgcatttcaatgacattttctaattggatgtggctggcacacagaagcattattaacttctgtatattaatctttaagcagccatcttgctgaactctcttcagcagcaagtgtgacttgctcttggctttgataataccttttatcaggcggagttcctatttattcctaatttgctaagagtttttgtcttaaatgatgaaaaatcagaagcatgccttttaagagtcaagggtgccacttccctccacacggcactggatgaaggtcctagccaagacaataaggcaagaaaaagaaattagaggttataaaagaagagacaagaccaccatcatttagaactaatcagtgagtggttcctgagcatattttcttatttctgatcctttgtttaacctgtatgccctgaaaaaattcttccttcatcccatctccaatctcattctcattaaatttcttctcaaagtccaaataatcatcctaataatagctaatatataatatattattatatattatatataatagctaattatatattttttacattattttgtatatatatatatatatatatatatatatatatatatatatatacacatacacacacatatatatatattagagacagggtctctctctattgtccaggctggagtacagtggtacaatcttggcgcactgcagccccaaaatcccaggcttaagcaatcctccagcctcagccttgcaagtagcttggactacaggcatgaaccaccacacctggctaatttttaatttttctgtagagatgcggtattgctatgctgcccaagctggtctcaagctcctggcctcaagcaatccttccaccttggcctcccaaagctctggggttacagatgtgagccaccatgcctggcctaatcgctataatattatttatagattgtttattgtgtaccaggtagacatttcatatcattttttagtccttacaacaaccttttgatggaggctattattagctccactttgaaaatgacaaaactgagagagtttaagggattaggtggagctcacacagcaggaaagtggcaaaacagagatgaaatcagagtccggccccagccttggccactgcactagactacccacctcttcgtgatccaggacccagactttcctcccactggcctctgctttggtgtggattccgtctcccaccttccccaaatctctgcacatctgttgtggacgctgtgacgcaccactcagatccccttcgggcctggggaacgtattcccccagctgcaggaaagtgctgccaatggactccctcagatgtcagctgctttggaactgccttggctgcacaggcatcatctgctcaagcccacagcctcttttagagggagcccacatccaatgactacccaacaggagggtttaaaggctcagcctcctcgctgtagctcaggacaactctgaagggccatcccagctccccagcatccttaagactgcaccacagtccgacttctcggtttgctaactcctactttcctccctttttttctgcaggagggaatcccaagtatcctccctgatacacccctgcaccgaaatacagtctcagagctggcttcccagggaaccctggtgatagatcctaattatttgaggctcgcttcaaatgctgcttcccccacctctaaccttacccaaacctccccctcccaggttagaagttctccctctgaacaaacttctgtggtgataaccatccctctctgctgtatctgaatgagttaccgcttcacacctgtctctgctttcagactgcactggaagctccttgagggagaggaggacattgtgtctgagtcgtttatctaactacttcactttgttttaattaatttttttgagacaaggtctcactctgtcacccagtgcaatgcagtgatcacagctcacagcagcttcaacttcctggactcaaatgatcctcctgcctcaacctcccgagtagctgggaccacaggcaaatgccaccacgcctggataatttaccttttgtagagacaaggtgtccctgttttccaggctggtctcaaacatctgagctcaagcgatcctccccctcaacctcccaaagtgctgggatcacaggtgtgagccactgcacctgactctatcttctttggcacctgcctttaccactgagtatgggctctgggattggacacatctggattcaaaccctaacctcacctttcttggcatcagtttcctcatctgtaaaatgggataatggcagcatcttcatcttaggtttgaagagttaaatgtgtatagaatgcttagcccagagcctggcacactgcaggcgtttgctcactgtttgttatctataattattgtttacctactgtcatgctagtgctaatatatgtttattaaatgagttgggagtgcctgatgatgaccggcttagcaggctctactggcagagtgaccgttcgcgacttcatctccctgggagacggtggagattggctgaaggcgcctcatcccttggcagggtgcccactctgctctctccctcctccttccccatgcaggcctcatagctggaccctccagcatgcaaacactcactccactctctcatgcaaccaaaaaataaaaaataaacttggctttgaatccaaggccagtgggtgcttttgatctcggttacaaagcaaggcaattattgaacacaaaaagccctgatttatttataaaatgcgatggacatcttcgaggcgggaacgagaaaactcactcaagaccaagtccttgttgccacacagtgaatggctgctttcaaacacaagccccccacatggcctcgcttctctgcaaagagtctttcctcattagtgcttcctcccaacaccacagcttccaaccatcaaattcacatcacggccggggcaagtaattaaattccacaggcatcagagcatagaataatggatggctattgttaaggaagctgaagaaaacagaatgaggctggaaatggaatgggcttcaatacccagtttcagaaacggttagcggggagcaggagagcaagtgggatgcagactgaccctcccacctggtgcagcacatgggatagtggctttagtcctggagctggaggtgaaaacctgagtttggagccagactctgcatttgccaaacatgagcctcagtttcctcatctgtgaaatgaggaggttggactaggagtcattctccatgtatggtccccagaccagaagcatgagtatcacctgggaatatgctagaaatgcaggttctcaggccccaccttaaacctactgaatcggaaactgtggggctggggcccagcagtctgcatttaataaagcctccaggtgatcctgatgcatgctagattttaagaaccgcagtgaggtaatgtttaaagacaaggccaaatactcaaatgcacaaagggccagagaggcaaaatcaaggagccaagtaaggtaaaatacgccagcagggtcagtggagtggcagagacagcgtgcctaggctgacggggctggcagccactcagctaccgctagctgatgccacgtgtgagtccatgtggggctggtatagtcaaagcttctgattttgcaagagaaacacaaaatcgtgattttgggagaaatctttaaatgtttaaatgtcaacttaatctttcttaacatagtaagggccaagaagattatacgtcagagccaaactcagttgtgcactgccatttttcagcctctgttctgagttttttccttcgacctccatcaccataaactctacccactggctcttacctttctccagaccctgaactcccaacctcctttccccattcagcaggctcttattcatccgtcaacacccaactccaggggcacttccactgtgaatttattctcaactctttgccccactttccacctctcactaagaagacagagaagaagcaaacaggaggccaaagaattgacacacagaaggtgacaccgaggaggaagacatggagaagttacaaaacagccttttcccacagaggaggaattaggacctcttggcagttaccctcctgctgcttgaaaaatcactcaaataaggacaccgatcccatttgaccagaatctaacaaaatgaagttttagaagggtaaatatgaagaaacacaaaagcagaagtcaaaggctgcattaaaaaacaattggtacaaaaatacaagggactttttgctgactgagagttcactgtgtcaatcatgtggtaaaacaatcatcaaagcggcaaacaccatcacgggtcttatgagaaataaagtgtctggacagccctgctctgccctgagctgctcagaccttcctagagtattccgactggttctgaatagtaacttctgtaggtcagagaagacctgaagcatgacccaggcagggcgactgatatggggacagaaacacaaagccaaattccaggaggacgatggaaggaacctgggacatctgcccataggcaggaaggaccagtggatggtcacgatttctgccttcaagcaactgacaggtttccatgtgacaggtttgatctgtttggccctctagggatgatcaggacctgtgagtgaaaacactacaagattccatttcggcattcgggagaattttctattgatcacggatgttcccacatggaatgagctatcctgagaggtaaggagcgttctttattgagggacatctagcagaggcgtacagctgctgtagaggatgataaaagggctggaaaagagagtccagtggccatctcctgttttatttctcccttcttcttgtaaaggcacccctacttttcttggggaaccacccctcacccattctcagtcccatgggtcaggtggaactgagtgtgcatctggcttcagggatgggtatgtgtcccggcctggcgaggcagagccctgcagcgccccagccacagacgcagcacccggtgtgctcacgtgacccgtgctggaccaatcacagaccaaaatatcccattctgggaaaagggacttgaagcagagaggatgtaggtctggagatgccaggggccctctggttatcacacggccagcgggtggggctgactgtaaaagagcccctcgcctccccacaaaaaacgggaaacagagaaaactggagcagagttgccgaaagagttgcagaaagacagagttctagtaacatcctttgttcctctgaagccccgcatgcccgaagccaggcttataactagtaaggtccctttttctcttaaagaggggcaagctgcatttctgctgtctgccaccataagagtcctgatcactaacgatggcctcctggatctcattcagtttaattttgctagggctgatccacatctcacacttaaagcaagggccacgtgcaggggcttctggaatttgaagtgctcctctagtcataagaacagactccactgcaaaaggggaaatggagaatcatgaaaaggtaagttattaagtcaaaccacctcccgcatcagtgagaagctggcaggcagggcagctgcccaggcccaagccagaagataggcacaggacagacacctggcctagaagccgctcccatctcccgcagcctcactgccagactgtggcttggtagagccctaggaccccagctcagacatggggagtggtttctattcttagggatcactggcaagctaccatttaataagcacctactggataccaggcctgggctggacacttggctcacctctgcatattaaagcggccccctgtgaagttggcattgttaccagctccatttcccagatgacaaaactgagactcagagagacttgcccagggtgcagtgataggcagttctgagacaaactccaaaagcccagccactccgcctcctgctggtaatgacaaggggcccaaagcaaccaagtctgggttctccttgcagcctcccaacgctttacttcctcacctgtaaaatgaggtgagtgaggatccccagtctgaccagagagcagcctccatagttgctttgaggtctgcgggaactattattatgtaaagagtgccggcctccattccgaaattaggtgtaactgatgcaacacaaaggggccgtgctgtgcaaagtcagccagccaggctccgtccgcgcctctctccaaagcccctgtgggctgggttgtttcctttgttccacaggcacaggcctggtaacaaggcagccaggagctcagctgtagacatttttttcattattttccaccctgttaacctccatcacaagtcaggctgctgtcagcctaaatgagaactgaaaagatttatctcacttgtcccagggctcagctcaggaaaaaagacccttcatttcctaaaggccttgatgaccctttctctgtgagtcactcccaccaaggaaaaaagatgtgacagcagcagcaggcgggggctgggaatgggaccaacagtccaaacttgcagacgtctggatcacttcagtttggctttgcaaagcactgtgtaatttttttttctttgcaccgtatttaccttcctaattgtgtttgcttatgcaatatgaaacttagcccacatttcataaacacaaccccagaaggagaccagaagcatattgtgtggcaggagaaaattagcctgcgattacacttttgctatagaagtaatcctcaaagtggacaatccaaacacagaccatggagagatgattatattttcaatcaacttgtccccttctttgtgcttctagcaatctcagatcaccaaacccctgaaactggcacctggcaagaagagatgagctagattcttttggtaataatagtctcttaaattcgcataataatagtcagctttcatgagcacctactaagtgccaagtgatgctctccatgctgtacacaggaacaacaagcctgttaatccttccatctgcccatgggtatttatctccatcaccatttcacaaatgaggaaactgaggcacagagcattgaagtaacaagcccgaagatacacagctaataaatcatggaaccaggattatgaacccaagaatttaagaattctggacccagaggccacatcccaaaccactttgcaataatgccactctccccgcacaccatttgtttaacgctcaccctcctgggaagtagctgatcttaaccctgcaggatagacaaagaggatgagtttcacagaggctaaataacttacccattttacagacaaggaaactgaaattcacaaaagtgagtttagttctacaaacatttgcacagcaccttgtacatgccaggcactgtgcaaggaacgtgggatacagagacctcagtgctccttccacactcagcttctggatgtttatatgggtaaaacctttctgaaggcaataaggtacactgtcaaaagcattaaaaatgagcatactttcgactctaaaattcccactgcagaaactgatcctaagaaagtaacagcgaatgtgacaaagaagctcacggcagtgttatttataagagtaaaataacagaaataaactaagtgctcaacaataagagattaaatagagtacatctatataatgaaatactgtgtaatcattcaaaatgttatagaaatatactattgatgtgggaaaatgtaatagagtgttacgtaatttgttaggtgacataagcaggtagtaaaatcatatatgcattatgatctgatttagaaaaaatgcatgtgtacactagaaaatatacaaatctaagcactctcagaaaatgcatttgcgtttgtacacgagaaattcctaggatatcaaagtgattatctccaaacaatgccatttcaggtgattttaatttttgtgtgtgtgctcatcgtcattctttaaaattttctacaatgaatatgtactacttacctagccatgcaaaggttttcatttttgtggcagtggttgctaaagtggctaagactacacactctttaaaaggcacatccagggttcaaatgggctggggtcccaagtccagccctcagccacttgcatccttcaatgcacctgcccctcctggtcccttgtctccaaaccacatcccaccctggctggtatactgttaccatgggccagcttggggcaaagacctgggacacgtagagcagcccacttgcctacctttttgaagagtctgatgacatcctcactgatctgggagaggcggacgatgacattgttcatgaagatgtcattgagggtggcatggtctcggctctcccgccgggtctgatgcagaaccagataccaacagttcacaggcgagaggaggtactggtccttcctgtggaaaccaagaaagctcaggttggctacattggaactgtcatccaacagtggtttatgctgtcacccacttcagctcttttaacctccacggtgccccttcaaggtcagtcttgttgttacaccttatacagttggggaaacaggctacaacagctgaagggatcctccaaggtcacagaccagcactggggccagaacccaggtctttgacgcctatgcggttctactctagcactgaatgtggtgcttgctccaggtacctctaccttctgggaagaagctacctcccctggggctaagaaatactaaaccaattgttttttaaatattatacttgtatgatttctggaactatgcaatagaaagaacaaaaagtagatacttccactcccccattctgcctgcctcaacccctgtaattttcttgggctcttaacttctttgttcttccccagggattggcttctgtctcttggcctcttggaaacacatgcctttgcccctccacggagctgttgggaaaggggctaggagggctcagattctgtgttcaggaggaagggttaaggaaaatgcaagtacctacaagacaaataaccctttgtcctgcaatgactgataggttattagcactctctagctgggtgtgatgctgaagcaggggttcttaaagtgtgctcccagaccagcagcaagagcatgacctggggactggttagaaatgcagactctccagtcccactccagacctgctgagtcacacactctgggggtgggcctgcaatctgggctttaccaagccctccaggggattcggatactcactcaagtctgagaaccacagatccttatactattgtttcccaaagctcaggatgctaatgagaccagagaaaatctgtctcttggctctgcagatgctcctcaacttactacagggctacatcccaataaacccctcacaagttgaagatatcctaagttgaaaatgcatttagtaagcccaaactacggaacatcatagtttagcctaccctaccttaaacgtgctcagaacacattagcctacggatgggcaaaatcattgcacacaaagcctattttctaataaactgttgaatatctcatgtaattagttgaatgctatcctgaaagtgaaaaacagaatggttttatgtgtacttgaaatacggtttatactgaatgtgtatcactttcacaacactgtaaattctcaaaattataagtcaacccatagttaaattaaggaccatctgtatttgccaaagacccctctgtgagcctcaggaaagggtggatacaccctgttatccaggaaggaagagaaaggtcaattcaaaagcaaaaccaaaccaataaccctttcctgccacgcagggcacctatgctaaagctcttgccctctgacccagggtatctccctgactcctttccagtgtggagagagatgttggaaaggcaggatgtgaggggagaggcccttccaccacctgaggtggcagctccagggttcccccaggcctgccttgtcccacccctgtcctgagtgtggaccacctccaggagctggccaaggttctgttcttagaaaacacagcctcccactattagcgttttttgaggaaggcaattgatatagtttggttttgtccccacccaaatctcaacttgaattgtatctcccagaattcccacatgttgtgggaatggtcttgggggccagtctttcccgtgctattctcgtgatagtgaatacgtttcataagatctgatgggcttatcaggggtttctgcttttgcttcctcctcattttctcttgccaccaccatataagaagtgcctttcacctcccaccatgattctgaggcttccctagccatgtgggacagtgagtccaattaaacttctttttcttcccactcttgggtatgtgtttatcagcagtgtgaaaatggactaatacagcaattctgctgactcccactatgaccacatccacctccccaaagccaagcagaaggacccctgaactgctgtccccaccccacccccaccaccccacctctccctatctcctggggcttgggaaggtaggtggggcagggctaccttgacttcaaggaatttttctttctctcaccaaatgtgctaaaaatctatctaggcagcagaaatttgtgagaagataattagatttagataaaggatgggaactatctaaggaaaagggaggatgatgaagcatttacaacactgctgtgaaacaaccagatttctccttggcttatagcctagagtaaaagccaggacactacaattagaccccaactagaatccctcagcatctactgtgtcaggtcttgggtgggttctgggcacccaaaggtggccgtgatgcacactctgccttggaggggctcactgctgagtggctgcatcagaaaaaaagaattagagaggaaggtggttccagtctataacagagacatacgcagagcatcagttctgctggagaagctgcagaaggcatcgttctcctccagtgtgttctgggtaccaggcacgcggcctcttctattcccactggggcctggacgcttttccctctgcctggaataccacagtccctgctcttctcatgaatgcctgtttctattactgtaggttcagcttagatgatacctccctagagaacaccccgttgaccacacgctaaggcagtggttctcagtgtggcccctgaaccagcagcagcagcatcacttaggaacttgaaaatacaagttctcagggcagccccagactacgtgtactcagaagccctagggctgggcccagaatctgtgttttaacaaactctcaaggtgatttggatgcatactcaagttacagaacttctaccttaaggagtttccatccctccccctcaccctactgtgagctctttgagagcagggatcacttctattgtgtcatcacgtccagcacccagcaatgtgcctgccatgtagcagatgctatggaagagagacccatgaaaaaagactgcatttgtgctgggtcttgaaggatgggtaggagttttccaaatggtcagaagtcagagagaggatggaattgtgggtagaaggaccagtgggtacaaatatagtgaagtagctcagaagagctggaattctgagtgtgttagtggaggactgtaggacatgaggctggggatacagattaaaggcccaatgttgggggagactgccagactaagggggtgggaccccttatcttctagaccacatagttctcaacctgtcctgtacactagaatcaactggggagcttttaaaaaaacaccaagacccaggacccatccaagacaaaatcagaatctctgggggtagcgcgtggtactcatatttttatactctctagaagattctaatgtgcagccagggttaagaatgcctgctttaggccgggtgcagtggctcgtgcctgagtcccagggctttgggaggctgaggtaggaggatcacttgagtccaggagttcaagaccagcctgggcaacatagcaagactccgtctctacaaaaaatttaaaaattagctgggcatagtggcacacacccgtagtcctagttacttgggagactgaggtgggaggatcactggagcccgggaggtggaagctgcagtgagctatgatcatgccactgcactccagcctgagtaataggcaagacccagtttctaaaataaataagaatgtctgctatgggcagtggggagtcatggaagttatttcagcagaggtaggatataaccaacatgtgttttggcatgatcatggaaggcagattggaggatgaagggatggatgggtaggtgggtgggtggatgagcagggatatggggcttttggtaagaggaccaggcaggaggtaatcttagttcaaaagagaaatagtgaggcctgggtgtggtcttgtagccagcgaaggatggacttgagagatttctcaacaggagagcagatcctcttggaaacttcctggaaaacagcagaaagaggaggaaggagcagacagtgattccgaggctcagatcttaggcgactgggtagatgctgatgacatgaactgagataagaactgcaaggggagcagtaggtttggacagaaaatgcattgcttatctcattttcactgcttcctaggtggtgatggaaatggaaagattaaaggagagatgagataattgagctgttacctaaattacttcaggggcttagctgaacctgggaggcaagaagtgaacagcaccagggaattaaattgtgcaaaattatggaagccacagccagaaggtgagtttcagagggaaggaaaaagacaactgatctggaactgatggggaattgctgggacagtttggggaccattaactaggtcatctagccagagagatgagatgagaggaagggcagagagcacagcgctgtccttatcagaagctgcaagccaggaggcagtgcggtataagacagaattgcaggaggcagagcgagccaaggcaaggaggaggatgttacccgaaagcagccaaagactcaagttgaagtgagcagctgctgtgaagattccttccagccctcgttcactccttgcgtttgtgtgtctgtgctgggcaggactaggtgctgcgagtgcaggagcaaccaaggctgcaagaccctgccctgcaagtcttccacttgagtaaggagattcacaaggaacagaaagtgatgaggcagcctcatcagtgcagtcatgggaaggaggctatggagcagagaggagcctccttccccagatctggtggtgaggttggtcatgcatggcttcctggaggaaacgctttctagactgagaactaaaagccggactggagtttcacagggaggagccttcaaaggggagaaatgtgatgagcaaaggcccagggaggagcaggagagggaggagcaggtagggagggggcccaagcatggtgttttggggtaggagagtgaggacagcaggtgaacatggagactgaggcaggggccacttgggaaagggcctttaactctcattagagttcaagctccgtcctgaggtcagcaggcagaccttgaagggtttacagaaggggagtgaaagggtaaaactgcactttcaaactctcactctggctgctgtacagagccaggggccgggagagaaactgagggattcaagaaaggcttaggtaggaaattgactggacagggagattgacgggatggagttagggctggaagttgagagagagcaaaagatgtccaggatgactctccagtttttggtttgggcacctgggggagtagaaggagcctctgtggagatgaagaggagcaggtcaagggtggggcggggagggaggatgatgagttcgagtcgaacacgacgagtctaaaaggctgtggggcatccagatggagctatctgggctggagagacaaacatggaagccagcagcaaggagttggatgctatttaaaaccacagaacaacaaggaaggctttacaaatgctgtggccacatggcagaagaggtcaatccccgggaagcatggcaaggctgtggccggagggctggggcagggccaagccgcggtggcgcctcccctcctgcttccctaaaagagggcaagatggggcaatgtgcagcctggcctcctctgagatgctgtcccaggcctgccgtccgatcagcggcccattctctaggtccatcccagcatgggaaactgctgggtctgcacccccaccttctcccagccctggctccctcctgtggggcaggtcatttgtagtctaaaaggctggggtgaactgtccacagccagggtcaagagctgctctgtagaaagctagcatgtgtggccttggccacaatggtaccaggcaggctctaccacatctgaaagaagaaggcccacaggtgggactcagcacagcagtagagaacagaaagccacctggacgtgggcatgggtgttcaccggcgtctgccatgctagctgtggactccgggcaggccacctattccctgtagcctggccactcacaccatggagtcactctgggcttaaatgccagaagagagctctgcagtcattcttcagcagttcatgcattccatacatttttgttgaatattttgtatagatcagaccccagggacacaaccttgagcccaacagacacagttcctgccttcatggagcagacagtctggtgaagagacagacacctaccatgagcccacgaatgtgggtagagttagaagtgcagaatgtgctggaacagaggggagcctgtgccatgagtgcctgtaataagggggctggcctgatttgtgggtcactaaagtgtccccaaggaagaggtcattaagctgtgctccaaaggaagagttggagggcgctagtgaaaggggctgggcaggtgggctggcgggagaaggctctaggcagagggaacagaatgggcaaaggcgcctcagggcggagagcctggtgcatttaaggaactaagtaaagaacagcctggctggagtgggaggcaaggcagaggaggaagagggtgaagagtgaggctggaggggcctgcagggtctcacacactccatcctgcccccatctggctcacaatgggactgcaggagggaggaagcacgagggccgcagaccgcagagccagacgccaggctgcagaaaacttgagcctctgccttccctgttcctggggttgtttgcccctttggaaagtggaacccctttgacctgagatccagctctctgtgccagcagccacttttgtcttctgcagcctcatttttggaagacatcagaatgaatgagggccagtgccctcggccaaggcactcagagtgacccttccgcttctccaatctttcatgcaagcgtcgacccagcaagcagaagctgctgaactaagacatcacgttagaaattttgcatatgtatgtatctattttctttttttatggccagaaaatagcaatgaacatttctggtgagtcacagctttctttctttggctaggggatctggatatgaggttccaggagactgcagctaggggagccaggccttgccaagctagtgagttgggaaaatgaaattagcagtgagccagtttctccagcttctcggctgagggccggaaaattccgcttagcaaacaaaacccatttccaagcttgcagagtcccatgttccagatgaatccaaagccactgccctgggatcagggtccctctgggaggaaggcaagctcctgcttgggcttcctgccccgttccaggaccttctcaggcctcacactgggcttgcgtccgagaaatgctaactcaatcagttctgtggccagaaaggtgcatttaacctcctgctacctaagctgccccaagcaggattcagcattcattgcacttgcttgtagcatgaatcattaattcagccaatagtaagtgtgtgcctgttctgtgccaggcaatggtaagcaaaatgagccacacttcccacttcgtggagcttacagtctagtgggggtctcagataacaatcagataatcacaaaaatcaatagaaaatggcagcgggaagaagggctctgaaggagaaatacatggagcctggagagtctttaacagggggctgccctctcctggggaaggcggaggggagggagcatcaggggaccctggggtccttctcatcactgagacctgagctgagctatttctcctcctggatgcctccctggccacccacacaccctatgtcacactatgtcattgtcattacagcactccacacctgatgcttgttgtgttcttttcctttttgcttctggtctttgtcccctctctagcttatgtctgtcctactcatcagtgcttctctggtgcccaggccaacctgggcacacaggcactctcagaaaatatttgtgagtaggtgaaaagtgccccctgagctcagactagaaggatgggtaggttttaacacagcacagtgataaagaagagcattcccagaaataagcatgaagccctcatgggcacgggcatcatctagaactgacagaaagtgagtgtggccagagggcagacagggactggatgagggtcagacaagactgaacatgtagcacagccagggccctgaaggacaagacgtgcatggggctgcgtactagttttgtaggtgctgtcacacaggaccatagagtggctcagacaacaggtatgtgttgtctcacagtcctggaggctggaagtccgagatcaaggtgtcggcagggttggttccttccaaggactgtgaaggaggatctgtcccaggcctctctcctggctcctggtaggttgctggagatctttggtgtccttggtgtagacacagcaccccaatctttgccttcacctttccaaggcattctccctgtgtgttggtctctgtgcccaaagttcctttttttgtaaagatacacaccagtcatgtcggattagggcccttcccaatgacctcatttttatctgattacttctataaagaccctgtttccaaataaggtcacattttgaggtactggagtttaggacatcagcataggaattttgaggggacacagttccaccctgatatggtttggctgtgtccccacccaaatctcatcttgaattgtagtataatccccacgtgtcatgggtgggaccaggtggagataactgaatcatgggggacggttcccccatgctgttctcatgatagtgaatgagttctcacaagatctgatggttttataagggggttcccccttcactgggcactctttctctcccctgctgccctgtgaagaggtgcctcccatcatgattgtaagtttcctgaggcctccccagccatgcgaaattgtgagtccattaaaccccttttctttataaattactttataaatatttactttattatcccccacccaccaggagtcccccgaggagtgtgaggctgccatgctgggagccagagagcgcagttcagggcctagctctggcactatttggcagcccggagacagagtcatcctgaaggggactaattccatccattgagtcccctggccaaagcaggctttgcttatcagttggggtgctattgagtcaagaggctggggttcaaatgccaattctgtccctcaccaacaaagtgaacttggaaagttattatagttaaaccttctctttccttatctgtgaaacgaagtgacgactacctcatagtggtgcctggaggactaaatgacacaacccatgctattctcttggtgtcaaaccctgcacataatagtactttttattgtcattaccattattaccactagcacctcaataagttgttgggaagatctaaggcctgatgtacatagacaaacagcctatgataagtgttctaaaactattggtttttctcctccattactactttctccttctgcagactgttatgtgaacttcaatgctcagtgcaaatgtccctgtgactcccccttcatcccagggcagaatgattcacgggctcactgcttcctctgtgatcccattcctcacactgcagcatgagggtacacgttggtgtctggtgtccagcagcacctctgagctcccctttgactttctggatggattcttggtatcagagcaaaaaactctgcctcataggcaatgcctggtcaacctcaactctttccttgcaagcccctttgccttggtttatctgcccacagaatgggtggcaccgtgtggcatgtgtagcactaggcagaggaaaagaccccgatccatggcttcctgattgtttggtgcctgtgctgtgcaggtcatttaatcttctaagcaccccacacatccacatcaccgtgaaccaagtgctctactggatgtctgataggcatcatctcattgcaccttcatgggaaatgtggtctgtgaagaaggggctgtctttatctttctaggtgaagacactgagttttcaagaaattaagtcatttgcccagatggacacggctagcacaggtaagtggcagactagcattccaatctgggtttacctgactccaaaatgcaaaactgggtcagttctttcacgggtcagctgtgggtctgaagttagggttcaccctgccttgcctatcagttggtcccttgcctatcagttggggatgacaacaccttccttgactccttcaactctcaccagggttcttgggaggatttaagcagctaagggctgaggaaggagtttgcaaagtgtaaggtgctatatagtctttgaaggttattattatcctatttgcctaatagaatagcatcaaaactaaacccgtacatattactgtttgtgaaaatctaatttttacatctatttttcatttctagtataaaaattaaatgatagaaatgtatatatgcatatcaaagtatatgcatgcataaagaaatcacgtcctagttaatgctttggtagttgctgattagagtctctgaggattccagggaatttggtgtgggacctgggaaagagccagatggaaacattggaaagagataaaggagctacagccattgcaaaatccactcttcaggctgagcctcctatgttaaaatcctttcccctcatttaaaaaaaaaattgtggaggataaagaaggtaaagatgaaagatgctcactttgcaggagaaactggaatgggacttagagtgatttgatgctggcttcaggatttttgccattcctgcacaccaccacacttaatatctccctgttgatgtctttttttaacttaaatttatttacaaagaacttccctagtttcagctttaaaaaaaacaggatggtttgttataaatagaaggtaaccaaaaaactaaattcaacaaaaaccaaacagtatattcaatcttgaggtctgttctctatttgctaaaaaggagattggaggacattaacaatacactaggaccaaactgagactttctcctccaggctaccagaaaccttgaaagagaattgagaagataattcaatatttatggttcctgtgttatcaagaatcccctttcattttgatcatccatattaccgaaatgacacccttaaaatacccagcctttgtgtgtatacctctgtgcattgagaactcactacctccccaggcagccctttcactgatggacagctgtggctactggaacgtccttaaggttgaattgaagtttgcttctctgaaaatgctatcctcggacatcatttatctcctttcgcagccacacaaaataagtctatttgttaaatatatttaaagaaagcatttggtagtgtcttggttaattcagccattcactgaaaaaactttgataaagcatcaattatataccagagagagggagactagaaatggtcccttgccttcaggcagctggccgactgaagtgagagaaccagatataggaactggatcactccttgataatctgatgcaagccccacacaactcacatgggaggcgagaggagcagctgactgtagacttgggatcaaccaacagcaggggcttcaccaagaaggcaagccctaagctggcctctgtgtaggagttgaccaggaggataatagcaaacccctgatgctcatccaaggaggatatggtcgacatgcatgggtaattctcaagaagctcaaagccagcccagaaagatgagggaacaaagtcagcagctagatgcagttttgcattttggagtcaggtaaacaaagattggaatcctagctctgccactcacctgtgctagctatgtccctctgggcaaattacttaatttctcgaaaactcagtgtcttcacctagaaagataaagacagccccttcttcacagaccacatttcccatgaaggtgcaatgagatgatgcctatcagacatccagtacagcacttggtccacggtgatgtggatgtgtggggtgcttggaagagtaaacgacctgcacagcacaggcaccaaacaatcaggaaagatccagctggcacacggtgctgagagaacagcaggtctggaaagtaggaccccagaaagccattactagcttgataccaatcgcagtaatagtaatagctgtgaatggagacacaagccctactggagggctttctccatctccatctcattctaagcaaacattttaattctgactccttttcacatttatatgctcaatttatatgctacaaaagtgattctctgtttaggaatagcctggaaggctaagtctaaattatagcatctctttagagaattgctacatctgtgaaaaaaatcctgtgatgctttatccccgctaagaagtgttttcttggaaatgaagttagttgttcacaggaatcctctctcccaactgctctgtgaagctgaaagatgctccaaacctcctttgcacaggatatctgcatagaatattattccctaactagccaagtgcctcccagcacttcccaaattctggcttttcccaaatgtttaaatcatatttaaatagaactccctgctgctttttttcacagcagttaaactagcagcaaccagcacttaaccctctgcatggagcattttcatcaggtacagctcctggaaggtgaggggtatcaaaaactgagaaagctagaatagaaggggactctgtcaccccaaacacagggcactacttgcatggagtgtcactactacagagggtaaccccagcatttgtctagaacagagattttcaaactaggtctcaagaagtgctagtttgtgaaatactagtaaatatcatggggagagccaggtgcggtggttctgcctataatcgcagtgttttgggtggctaaggtaagagaattgcttgagtccagaagtttaagtccagcctggacaacatagcaagacccctgcctctacaaaaaaataattcatttttttttttaaatttcagatgtggtggcatgtacctgtagtcccggttacttgggaggctgaggcaggaggatcacttgagcccagaagtttgagactgcagtgagctgtgatcacaccactacattccagcttgggcgacagggtgagactctgtctcaaaaataagtaaatatgtaaataaataaatagggagagggaatcctgtggtcaaatagctttcagaaagaagtcaacaggcttaattattacaaaaatcagtctttcgtatcctccttctcctcctcctcttcctctctctctctcccattcaaacatctcaaagtattggtgttttagagacattttcctggaggaagaaaaagtctcattcccaggaaacatctgtgttcatggagctgccaaattcatttggacaagaccatccacctaccccaagaggcaggtttgggggccccatatgtgctgcctgctacaccagagtcctgctcaggaagggctcagctccaggccttccaaaggaaaagccaaactcaggttaggcctagcttggagagggcagtggattatggatttgacgctggtgaagaggagggaaggccagcacagcccaaaagtgagttgaaaaccatttattccccagaaaaacatcagactggctcttcaaagtgaactgccaacagactcccccagggggcttgttaaatgcagattgccaggccccccccccaagaagttctgatccagcaggtctcaggaaataccccagatcttgcatttctagcaggtcctcatgtgatgccaatgccgctgctcccattccccaaacagggagaccatggcacagtccacactctgtcctttcagcaatacaggacccgtgacaggcacatgagcgagtgacacttcacccagatggcctcactgagctaaggcagccagaagacaaacatgccccctttccctgtcctccctatgcaaatctaattatcacttgcctttcattcattagttcattaatcaatgacattcagtaacaaccaggtgccagccctgtgagaggtgctagggaccccgggtcaagagtcaccctctctgccatctcggagcttgcagcccagtggttgtccaaaggaggacagacaagtaaacagacgatgacaatacagggctgtagctcttacctcaccctcttccccaagtccttcccatctcaaggcagaaacaggagacatccttgttgcctctcttttcctccattcctctctgagaggtttcctggcatctgatggcttctctcatctgctctgttcccacccaggccatcactgtccctgcctggagagctatacccacatgcccatgagtgggctcctcggctccaccctccaacccaggtggtcttttaaacatataaatcacatcatgcaactcccttcttcccactcccacactcaccagttccagccacttggcttccatccccctccactgctgcacgttgctccttctcatttctcaggcctcagcttaaaccacgcttcctccagacaccttcctgatcgtggtcctagcttggtgtgggctgccaaccctttgacactcctccaatgataggagggctttatttcccctttcctgaagctgagctagggctgagacagctttggcaaatagcatctgggtggggagtgatgctattccagctccaggcctagcagttaagaggactgcagctgctgtcctgctctctagaagccccgagctactgtcagaagtctgatgcccggctgaagcaggaggccctgacactacatggagagggagacagcccagcagggcccggcctactagccgtccccatggaggaaccaggcatgcgagtaaagctctctgggactgtccagaccaggccctctgctagctgaatatcactgagccatcaatgccacatacagcagaaaaatcacccagctgagccctgtccaaatctttgatccattaaatcacaaggtacactaactttgggggcattgcagttatacgggagagataatcagaatactccatagtgtatttatttccatcatagcaatcattggattatagctggtctttcttttagctgctttttaatgttttattcttcatggtaaatttcaccacagcaggaaccaagtctatcttgttcaccactgtaaacccagggtctggcacatggtaggtgctcaataaatattggtggaataagcaaataagtacatcagagtacgacgggcacacagagggaggcaccaggtgggaatcaaggaagcttttcaatagaagtgacatctcagtgctgcaggctgatggcacgcaggtgcagggctcaaagggcacagccatgggattggggcctcctcagccataccaactaccaggcctccccaagccatgttcttgtctctcagtatctggcagcagaaatcgcacctcatttatctttgtgtcttcggcactgagcacagtccaggaaaatatgaggtcttcaatgcacacatttcaaacaaatgaagtcccacatggcttcttggagagagaagcctgagttggaagtcaagaaccctgggttttcatgctcgacagctcattgggtcctcgttaaagtaagcagctcagcttttctgttgctcagtttgcttgacataaaaccactgattccctctccacttccctgggttgtcatcaggtttataagagagcaaggatgtcagagtgctttgaaagaggtttgttagaattggatatgtgttgtagaaaagaaatatgatgatatttttctctaaatgttaacctgtcccagggaaaccttcagaaccatcacgtgggcctttctttggatcacgtgtcacagggaactcagcccaggtgagtctagccctgaacacagcacagtgcgtattcctgggcagcagcacattcttcaattgcccaggtggggagggaatggctggggccttagggagacacggcccatggagcacaaggaggagcaatagactcggagccaagggaactgagtctccatcccagttctgctcctaatttactgtaaaatcttgggcaaatcagttccatctctgaggcaaatctctcagccaaagtggactagatagaccaagtcaatcctctcccttccttccttcctgtcttcttccctccttcctccctcccacccatgcacacgcaccccagctctgccaagcacctgacccactgcaatgggaataaaatgacaagtcctgggctctgcccttaaggcactgaggggctacttggcaggtagatggacattattaaaccaagaatctttacgacggtgagacaaggcttctcggaacagcccagatgaagggagcagagagcaacacaggtcctgtgtgctgggctccaaggaataggcagcccgaggccagtcagtgccctggggtcaaagggtgagtccagcctgcccctagagactccacttccagaagcggagacggctctgccatcacattagcatcgtgcagagggccccctccagctgcactggcctgggccggcaccctaattagactttcatagtgcgtcaggcagcctgcatggccgggctgccagctggggctcccgttccgtctggtggcctcagttaatgaacccatgaggggctggccgagctcattataggtgatacaagggaatagggtgcccccccatatccacaatccctgcctttctcctctccctatgtgcacactgagaatgggaagagagctgattcctaatcaaggggaaggagcggacaggagagatgctccagccctaccacatggccctgtctgcagctagggagagcccaagacttgctggctccagtggccattcagccagagttgtggggttctgagcctatgtctgctgtgcctgtggttccagggagggtccagatgtcatggctactctcaagctgcacctaggccctttcttatcccaggccaaggaggcagagaagagacaaaggttcaattctgtctctttccaattgcgggttcacagacatgtttggacaagctgctttctcagagcttcaccatcctcatctttacgatggggtagtaatacccacctggcaccaaagtaagtgctcggttcgatacattatctttgtttttattcttaaaagacaagggagaaatgattccaaaatgtgagcagtggttgtgagcagtgggactatgaatgatatttttctcttttctgtactttctaaattgtatacaatgagcattttacctttgttgtttgaaaaaacacaatttttctccaaaaaaatatgagattatatgtgtgaaagggtctagactgtgcctgagtgaatgttattaatagaggcttcctcctgcagcagaagtttgaagagaagagactgggtggctgggcgcggtggctcacacctttaatcccagcactttgggaggccgaggcgggcggatcatgaggtcaggagatggagaccatcctggctaacatggtgaaaccccgtctctactaaaaatacaaaaaattagctgggcatcgtggcgggcacctgtagtcccagctacttgggaggctgaggcaggagaattgcttgaacctgggaggcggagcttgcagtgagccgagatcgcaccactgcattccagcctgggtggcagagcaagactccgtctcaaaaaaaaaaaaaaaaaagggagaagatagggtagaaaaagaagcacggtatttgcaaatgtgtaatgcaccaatttcttatccccaaatgccaagagaaggcacataagtgagtgttcaaatgctgtggcacagactcaaggaagtgtttagaggagtttaaaggcagagagctccctggccagagtggaatgcaaaaaatgtggacaggaaggtggacgcgacccaagtgtccaccaacagatgaccaaacaaacaaaatgtggtctatctgcaccatattattcagcctgaaaaaggaagaacattctgacacatgctaccacagggatgaactttgaggcattatgctaagtgaaactagccagtcacaaagagacaaatattgtataattgcacttatatgacatatctacagcagtcgaattcataaagacataaagtagaatggtagttgccggcagctggaaggcgtggcagggaatggggagttagtgtttaatggggatagaatttcagtggaggaagatgtaaaaagcactggagttggatggtggcgatggttgcataacattgtgaatgtgtttagtgccactgaactgttcatttaaaaatgatgaaaatggtaaattttatattatgtgtgctttgtcacaattaaaaaatatatatatatatatacatacacaatacacatacatacacatacatggagaggccgggtatggtggctcacatctgtaatcccagcactttgggaggctgaagcaggtggatcacttgatgtcaggagttcaagaccagcctggccaacatggtgaaaccccatctctactaaaaatacaaagattagttgggcgtggtggtgcacgtggaatctcagctactcaggaggctgaggcaggagaatctcttgaacccgggagttggagattgcagtgagctgagatcatgccactgcactccaacctgggtgacagagtgagactctgtctcaaaatatatatatatatatatgtatatatgtgtgtgtgtgtgtgtgtgtgtatgtgtgtatatatgtatgtgtgtgtatacacagagagagagagagagagagagaaacaggacaggacccaggggaagggggatcaggatcaggtcaggtgagataaagcaagtcgctgatctcctggtgttgagggccaccagctggagagatgacccaaggagaagggagagtccaggaagcatggctgaaggagagacagtgctggccgggggacctgccaagtggagccctgcatggttgacacagtccaagtgagatttgctgcttcctgcctgcctgtatttaatgagctgaagccagggagttctaagcacagaaggttttgtagctggaggattcaggacctgccaagtcaatgcccaagcagatggagcctccatgatctcagagcttgggatatgagaaatcaggacacatgacagtttgtgcatcgaaaataagtaaataaggcagggaaagagccggggcactgaggtcctccaggagagcaaggaagaggaatgtttgagcatcaattccatggagaagaaattcactgagctaacaaaattcagaagaaggctggctgacacccaaataaaggacaactggatcgggacaggatgtcctgaagggaggtaggggtctcaccagggcacaaatggaggctagctcagtgccggtgcttggtagcataataataacagcaacaattgattgagcacctattgtctgtgacaaacactcttcttgggttgttcatttattcccttcaggaaacttctgcagaggaactctttctagcttccctttacacatgaggaagactgaggcttggaggtgtaagtaacctgcagagccagggccctgaaggcacaccctctgcctccaatgaagctggctggcctcctttctgctttgccaccaactgtccgcccaccccagtgctgcctcccatctctgtgcacccatacccaacttcttacttgaactggtgctcccgggagctgcggattttggaggagaagcgctcagccagcttctccaggctgcgggagtactcgagctcaatctcagctttccggcggaaaaactcctggaggtcttgaagcagctgcagtcgcgactctgattgctgctccagacatttgaactgctccaccagctgcgtgcggatctctgcgggcacacaagggtaggagcatgagactggtggtggggacgggggcactggggcccgctctgctgctggcctgggccctgcaattcaggcagctccctcctaacaccatccagagcctctctgagcccagccagagctcagaccttgcttggcagagcattggcacaaagatttctctcttgctcgtttttgccattgatctaaccaaaagtttccaaaacttgaatcactgcatgtcaccaccacgatttttgccatattcacaggccccaagcattcttatttcttccacatgatctagtaaattgactcacctttcttacggagatgatcttgcttaaaatgcaaaggtttctatcaatacagtaaagtgaaacactaggaccccttgcagcctgggacgtaggaaataattcaatgaaaacaaaagtattgtaaaattctatctagagacaattgtttaccaaaggctctaagcctaagctgctggctctttatcaaccaaaggaaaacggcagtgtgactttctccatgtgtagtcaggactgagagagggctgagaagggcatgcttttccctcgtgggtttcagtgttatttaaggccacatctgtgtcctgctttaaatcaccttgaattccatgtatgaacctctcagatatcacacttcagaaaatactgattgctcaaaccagatctacgcaaccagggcaacaattcaaaagctggaagctggagttaaaaatcacagctgaatgccaataaccacatccattcttgtcttcaagcctgtagggttgtcaccgccactgcccccaggcatagattctttccaggccatcccaagagctgctcaacagatcagcctccaaagcactctgctcacaccagcaacgtgctcagaaataccccacggctcccctctgcctgagtattaggtccaactcctcagcatgacattcaagaccatccaccaagcagtcccaaatttcatttctcaggactttaccccaatggactctccaaaccattcaagccagtccttggaatatcagatctcacctgcctaaatgtgtgccccgtctgaaatggtggccagcgtcatttcagcatccttcagagaagtggacttcaaactggggcagaactactctggggtacacaaagacaccccacagggtatgcaagctgaggtagaagggaatcaacctgagatcctccacatccattcccactgcctgacaacgtgcctcagtctagatgcacggcccctctcctttcctacctcccctcctcacaatggtcctgttctctctttacaggaaaaagagcaactgctcactcgtccagaatctatgatgcagtgtcccaaaatgtcgagacatctgggtgtcaaaaggaaaaatagaccatttaaaatgttcatgttggccaggcatggtggctcatgcctttaatcccagcactttgggaggccgaggcgggtggatcacgaggtcaggaggtggagaccatcctggctgacacagtgaaaccctgtctctactaaaaatacaaaaattagccaggcatagtggcaggcgcctggagtcccagctactctggaggctggggcaggagaatcacttgaacccagaaggtggaggttgcacgccattgcactccagcctgggcgacagagcaagaccctgtctcaaaaactaactaactaactaactaactaactaaataaataaataaataaataatgtaaaatgttcatgttacacatgttctcagttataagtgggacctaaataatgtgtgcacttggatgtacagtgtggaatgctagagaacagagactcagaagggtgagggggtgggagggaggtggataatgagaaattacttaatgggtgtaatgtacattatttgtgtcatgggtacccaagaagccctggcttcaccaccacacaatctatgcatgtaacaaaattacacttgtactccataaatttatacgtaaataaatacatgtacaaagttatattctcttcaaataataaaaagtgtttttaaaaagttgatatttggaaatcttcctctaatcaagggatcacaaacccttgctactcaaagtgtggtccatgagaccacgtctgtcatcacagcactttgagaggctgaggcaggagaatcacttgaggccaggggctcaagaccagcctgggaaacatagggagacctcgtctccataaaaacttaaaaaaaaaaaaagttttaaattagccaggtgtggtggcatgggcttgtgttcccagctactcaggaggctgaggcagaagtattgcttgagcccaggaggtccaggctgcagtgagctatgattgtgaaactgcactccagcctatatgacaaagcaagactctgtctcaaaaacattaaaatgtggtccacagaccagcagcatcagcaccaccaatgggcttgttagaaatacagaggcctaggcaatataacaagacctcatgcctagtaaaattttattgtttgttttgtgttttgagacggagtctcgctctgtcgccaggctggagtgcagcggcccgatctccactcactgcaacctccgcctcctgggttcaagcgatcctcctgcctcggtctctagagtagctgggacgacaggtgcgcaccaccacacccagctagttttttgtatttttagtagagacgaggtttcattatgttggccaggatggtcttgatctcttgacctcgtgatccacccgccttggcctcccaaagtgctgggattacaggtgtgagccactgcacccggcctagtaaaaattttaaaaagtaattagctgggcatggtggcacatgcctctagtcccagctacttgggaggctgaggtgggaggattgctttagcccaggagttcaaagcttcagtgagccatgaccataccatgatgcttagagggaactcctgtaatgaaaagaaaagaaaagaaaagaacaggtgaggagagaggaggggaggggaggggaggggaaggagaagaaatacagaatcatccaaactcatcaagatgcataaattaaatgtgctcatttttggggcatttcaattataccttaaaaaagctaaaaaaaaaaaattcagaataaagtctcaggccccagcccataccatccaaatcagaatctgcattttatcaagatctcccaaggtggcccttgtacaccttaaagtttgataagcactgccatcaaccatcccgcccatctcattatgagaagcatttcccatacaaagttatgctttaatgatttatcaaatgtgtaaaataatgttattttgataaattgtgtattactgatcactgcaatgatacataaatcaatataaaaggaagatccttagagttcaaaggaaaaaattaaaatgtccatttcagcttacataagtagagttttaaaaaagatgataatcttaaaaaactttcaagcataaaatatgttaagattaaattttatgaagcaagtgaaagggaattaggagttcaagaaggtaaagaaaggagcagtgtaaaacatttgacttgttcaggtaactttgatggatgattgtagaaaccaatgtattatggtatttatcctatgaccgggcaatttcactgatggatacatacacaaaagaaatcagtgcttatgatcaccaaaaaatatatacaagaatacttttagtatctttatagccaaatattagaaataacccaaaatgtctagtaagaatagaatggattttttgaatgtgagatattcattgagtggaatgatatacaataatgaaaaaggaatgctactgctcccaacagcaacatgtttgaaatccacagatcttgtgtttattgaaagaagccagaacgaatgaggttgtgcaaaactagtttatggtgatagaggtcggaaaagtggtcacgtttgacgggtattgatggagagagggaacaagcatggcttctgaatactggagatgttccacaccttggtgagggtggaagggacactgataaaaattaactgagctgctcacttaagatctgtgcattctactacatcaaagtgaggcttcaataaaaagacaaaatttaaaattgctatgttagtttctatttgacacatttttaaaaattttttgtagagacaggcctctttatgttacccaggctggtcttcaactcttgggctcaagcaatcctcctgccttggccttctaagtagctgggactaaagaggtaagccaccccacccatccctccccacaacattttgatacagttttaagagagtggtattatacataatgttactctaaaatgtgaatatttaaaacatggccaaaattatatcctttgtaactaatcaaacttagaataaaatattttattttatttagtgcaaattaaagaatgagacattttagatgtcaacttaaaatgtgtgaagcagaagagatatttttctttccaaagttcatgtagagggtaggtaagcaaaaaaaaaaaaaaaaaaagttgaaaaccactgcttcagagcccacataaagcactgctcctcccaggaaggcctgggctgccagcctggtgaccctcttttgaactcccatggcacgtacagcaaatctcagattgcctagcgctgtttgggtttttttgtttgttagttttcattctttcatgcatgccatctctgcctcatctcctcaaatgaaatttaagctctgagggcagattctcccagcacataataggtcatcaggatatcaatatctgtatagcaaattactatttcccttttttttttttgagacagagtcttgctctgtcgcccaggctggagtgcagtggcgccatctcaactcactgcaacctccatctcccaggttcaagggattgtccttcttcagcctcccaagtagctgggattataggcaccggccaccacacctgaataatttttgtatttttagtagagacagggttttaccatgttagccaggctggtgtcgaactcccgacctcaggtgatctgcccacctcggcctcccaaagtgctgggattacaagcatgagccaccacgcccagcctactatttccctttagcaagcgctttttaccaagtacattaagtgttgtgattatggaagcctcagctcacacacacacaaacaaacatatggcacacacattcacgccacaaatacatacaaaacacacaacacataccacacacaacaccactcaccccccacacatacatacattcaacgtggatgtataataatgaagaaaccaaggctttacgtaaaccaagatcagggactcatccaaggtcacacgtcgttctctgaactctaacaaactacacaggtcccctcttagatggtctacctgttgaactgaactgtattgaggtgcctcactcccacaagaccaaaccttgtcatatcaacacacagtcataaaaatataactatgcagtgagtgctactagtgtttctccactttttccccatagacaaggaagtagcagctcaggaggaagtcgctagcctgtgctcctaacagctggttcagagcagagccagcaatcaaacccaggtccctcagaagcttaccataatgcccttgacatgatgctagaccgaggcccctacaggaacttcttggtctgcattccatgaattatccttgttttccatattaaaacaaaacaaacacaaaagacacttttaatccctctgtattcaacctcttgcattctttttgtagcaagatggtgatctaaagagatattatttattagaaaagctgcagccacagccttcctcattacagagcattatcaggagatgacattctcatattttagaggaaaagctcataaatcacatcgtgatgacagcagacgatttggaaagagcagagcaacctcccccagttcacacaaccagctggagcctcccaggctgggctgtgcatggaaccctccagcagtttgccgggctcaaaatcaagtccttcttgcaggaaatggccctggcagagcatcctctgcagcctgccctgatctggaaccctgagggcatttgattacccatctcattatttctaattcccatccaagttgctgctaggagcctacgagctggcacagatttgggttttctccttgaagatttcaaagagagaaaaataaaataaaataaaacagaattgttcccaaggcacagacttcattcagcagacgtttcccccccgggggacagttccagccataacacagagctgagtggcagaaaaattaaaagggggatgtggcaaggagggaaaggggttggaaagagggacaggctttgaactcaacacctgaaagctgaagatgacctcactgcatggtgcagtctcttggttttatagacaggggcatgaggcccagagaaggggaagatctaattctttttttttttttttttttttttgagatggagtctcactctgtcacccaggctggagtgcagtggtgcgatctcagctcactgcaacctctgccttcccagttcaagtgattctcccacctcagcttcccaagtagctggggactacaggtgcacaccaccacgcccagctaatatttttgtatttttagtagaaacggggtttcaccatgttggccaggatggtcttgaacccctgacctcaagtaatccacccgcctcggcctcccaaagtgctgggattacaggcataagccactgcacccggccgtaagaactaattcttcaatccaggtctcctaaagcaccaatctccctgtgtcaccctcctgataaaattctccatggttccccattgcttataggatcaaagccaaactcctctgacattcaaagtccaagaatgcacagcctgcctacccatccccataacactcctgctcactctccaagcaacagtcttactaaagatcactttgcatgcacccaggctgccacctatggcaaacagcccgtgtgacccaccgtatggagagcaagattcctcatactccccactgctcctcacaaccacaacctcaccagcaatagtaggaagattcttcagatcagtctttttttttaattaatgggctatttttagagccattttaggtttaccaaaaaattgaccagaaagtacagagagttcccatatatcccctctccactgcacagtttctccgattattaacatcttgcattccatcgtgcatttattgcaattgaagagccaatactgacacaccaaagtctgtcacttacattacggctcaccctttgtgttgtacattctctgggttttgacaaacgtctaatgtcatgtgtccaccattacagtatcatacagaatagtgttgccaccctaaaaatcctcgtgctccacctatttcgccccttattcttccctctcacttaccccaacccttggcaaaccctaatcttcttactgtctctatagttttgcctttcccagcatgttatacagctggaatcataaagtatatagactttttagagtggcttctttcacctagcaatatgcatgtagggttcttccatgtctttttgtggctttgtagctcctttttatcaccaaataatattctgtgctacggaataatgttgacagactgtttattcattcccctatttaaagacatgttggttgctaattatgaataaagctgttatgaacatctgtatgcaggtttttgtgtggacatgttttcaactcatttgggtaaatatcctttttgaaatcaatagactttatttttatagcagttttaggcttactgaaaaaaaggaattacatttttaaataggaaatatagggttttttttaatattacatacacaactgaaaaggtagaaagggtatataaagttttactcccacctctatcaaccacctagttcccctctcgcaaaacaaccaaactaccatgatcgtgtgcatcattccagaaataatggcatatatataaaacatatatgttatatagatcatattatttatattatatgatatattatatagatctatatataagagagaatatctatatatagaatttacatatatagaatgttaaatatattatttcctctgtttttatacatgttagagcatatcattcacagtgttctgtaccttatctttttcttttaataatacatcctggaggccgggcacagtggctcatgcctgtaatcccaacactttgggaggccgaagcaggtggatcacttgaggtcaggagtttgagaccagcctggccaacacagcgataccctgtctctactagaaaatacaaaaacttatctgggcatggtggcgcacacctgtaatcccagctaactgttaggctgaagcgggagaattgcttgaatctgggaggtggaggttgcagtgagctgagattgtgccactgcactccagcctgggcaacagagcaagactctatctaaaaaaaagtaataataatacatcatggagatcagtccaaatcattatataaagaacttcctcattccttttacagcacactagaattccactgtaagttttttttagccagtctcttttgctgaacatttaggttgtttataatcttttactatcatcaacaatgctggaatgaataatcatacacaggcttcattctgcacatgtgcaggaatatcatctatataataagttcttaaagcaacatcacataaggatatcaagactgctaaactgccctctcctgaaattttaccagtttatactacgatgaaaactttaggacaaagcaggaactatttagaagcagacatgctgggatttgctccaaaatagccttaggtttggagacggggagtggtagggttttaagtaaaataagactggccttgagttaatcattaaagtttagtttagcgctaggtatcaggaaggggcttattatactattctctctacttttggaatgtttgaaatttttcatcataaaaaagggagaaaaagcagataaagccaatgcaaatcctgcacctctggttaacaggtctgacccattaggaacgccagcaacttgcccttggaggcctctgccccttgcctgcacccttggaggcctctgccccttgcctgcagatggctttcctgggttagtaagaggggccagagtatgacagcaaagagcaattttaaatgtagcttcccagaccccacccaattccaatctttggaccctgtcctgaaaacacagtaactgttctggcacctcctgggatggagaggcaccactcacagtctgcatacatcctgaaaaccaagatcaagggagcacttgccccctctgctccacaggggcagctggtaccttcccagtgtaaatttttaggagccgataaagatgaaccacctggtatgttacagccaacaacatctcatcacatctacgcacaatcacatctgattatcatgacatcctatgaggctggtagtattgccactcctcttctacggatgaagcaattgagattcagggaggggaaatggcttgcccaagaccaccaagaaagtggcaaagccagggctgaaaccgagagtaaagggcagacaggaactaacatcacccaatgcccaggtcagggaactttctgtggcagtcctgctgcctcctctttcaaggatcatgtcctgttgtacctcctgtctccactctcagtggtcatctttgtgccatccacacagagcaccagtctggctgtcattatatgcatcccagtgcatcctgaccctgacctcaggccctcctctgaggagagaaatctcagcttcatagcacaatgtagcgggctctgggttcacctgcccggtggttcaaatcctggccctgccacatgctcaggtgggcaacctgagactcagtttcctctgtcaaatggggatgataataatctctacctcatattgttgtgagaatggtatgtgttaatgcaaaggaagttcctggcatagtgctttccatatattggtaccatattgtccaacacagtcgccactagccacatgtggctatttgcatttaattaaaataaaaaactcattcctctgttgcacttgccacatttcacgtgttaaaccatcctggacagtgcagaatatttccatcattgcagaaacttccattggacagcactgcgtcagaggctttataaagttaagctatgattatcatttattataacttctttctgtggccatttctcatctccttaaatggaaaatatggtcctgaaaggcagggatggcactatgttttattactccgaatttgcgcacgacctctccaacaagagcagtgtaatggagtcttccaaaccctcccctcaagaaaacatgatgatggagactcactctccttgctcccagcccaaaacccagcatcctggtggggtcccttgccctccaactccagccctagcggagatgatgtggcccagtggatagacccagcagagcctggactctggagccactctcacagggttgattattgtctctgccggatctgcactgtgaagccttgggcagtcaactcagtatcttctctgagctgtcttcggatttgtaaaaggcaagtaagtattcttatcttgcagggttgttgccaggatcagactggaaataatgcacatgatgtgccaggcacctggtggaccctcggcgaatagcatctatacagaggtggcatggcgcagcggaagggcatgcactcacaagctcacaagttctgaggacagtcagcctaggctccaaatctggttttctccactttggggaagtggcttcagcctggtctctgttttctcatctgtaaaatagggaataataccttcccccctggggttgttaaaagggtgaggggtggtatgcgcgtggtgcctggggcactgcagggacgcaagaaatgagccatggcggctgctgtagtcatggaccgtgagcaccaggcacgctgggcaccgagctaagtgtttcccaggcgccatctcgcgccccgcgtccacagtcccacaaggagggctgtgtcaccagccaccttcttccagcctctctgtgctggttccccttccccgcccgccctcctcgcaggcctggcccacgtttcgctccttctctaggccctgcacaaaagactcgtgcgctgcccggacacgggctccccattgccgcccttctcctagcctcctgtacaccgagaggcggcttccgggacggccccgagggtccgcaggatccgtgcgcccagcgccggggctggaggcagcagatgccgggccggggtcagccgccgcgcgccgttgccacggcaaccgtcgctgggaccccccccccccccgaccgccccgccccgccccgcgcgccacgtgcagcagccggggtggctgaaagcgggctcctaagccatctcttcggattccttcttcgcagacgcgagcaagctcctggcaccctgtagtctctccctctccccttcctgtattcggccaacgaccgacatcaggccattctttattaacctttatcaagccaggccggtcagcggccatcctcaattattaaataataccacgttagaggaggcagtgggtgtcccgcccttttacagatgaggaaattgaggcccaagagaagggaaaggggctgcctgaatcacaggattggaacctgggcctgcctgatgccagagtccaccggagactccgccaggagcttcctgggtctatccctgatccccacggttcctgcggagtctgcccctcatcaataggccttttgggttctgcagtgccaaaagctggatctgggatcagacttggctgagttcagagcctgaccttgacgctggctagctgtgtgaccttcagcaagtcagtcaacctctctgggccttggttttcccatctgcaggatggaggaagtaagagcagacattttggagctgtgtgcttccccgaattgtctccttgaacctatgctacagccttaggaggaagttactactattatcccgttttgcagaggaggagactgagccacagagaggtgaaatgacatgcctaatttcatgtaaatattaagaaatctgttggccccaaatcttataccacgttgccagagagatgagtgcctgccatatgtactataccaagtgagccaggtttttacgctctgtctttcgccacctcacgattattcagggtagtaaaggccaggcttagaacagagaatcaaagcatatcaactccgaaggcttccctgaagcaaattttatctgcttgcagctttctaggggatgggggaacacatatgctgggaaggcagtgctgggtgaagtgactggcatctcccacactgattctcaccactaccagctcctccaaaaaggaagcacagtatattggctagtactttgaaaaaaataagagttatttaataatgatgatgctatcaaccaggaaaattttcttctatgtaagaggaaatgataaggtccccaacacactagggaattagcattggatatacatgcacggctgaagaaattaaagaaaggagtcccacttcccacagtggtctgaaagcagaaatccagctctgcagccccctgaccacccctacctagagtgctaaaccagtgcccctgaataggaagcaggcagcagaaagcagaatgggagggagagagggttttcccatagcatctgtgctgtgtccaaataatagccattccttcccatgaagaagtcagacagaagctgcctccacaccttccagatgttcagtgaaatgcaaagaacagccagagtgaggccacgcctcctcctaccagagactgagttaaagctggctgggtgtgatcaatttcaacacgagattaatattcacggttttgctgcccaatggtccctgaagaatcagatccatttaaatgagaagagatcaggattcattaatgctgaatttccagctgcgtcctctgactgatgatgtttatctttatgtttttaatcatactttcctcccagagctaaaatagaagtcagagaactgggggcctgctggaaacatctaaatctttcccaaacttcacagccatctttacaatgtgccccttctaaaaactacctgctgtatatttgtctaatatatttctttaaatcatcttactttttacctgggatgctttatggtaccaccataaatggaaccccccccacacaaaaaatgtgccactaatggaatgtaactataaaaataaacacaatgaacacaaaataatgttattaaattatacctagattctgtagtctgagacctgattttttaatataaaaggagtttagcaagtaagtattcaagcaagggttgaagacatgctagcacctaagagcaactttctcattgaggtaatcaaaaaggttgaaggcaggaagggttgaaggaggactaaaaagaaaataactatctgttgtcatgagttatgttacttagttctgtctctgcggaccacctaaaatcatcctgtatatatacagattgaacatccctgatccgaaaatctgaaatccaaaatccaaactttttgagcactcacatgatgccacaagtggaaaatcccacacgtgacctcacaggacaggtcacggtcaaaacttagatacacaacgcacagtttatttaaaagattgcatgaaattaccttcaggctatgtgtaaaaggtgtatatgaaacaaatgaatttcatgtttagacttgggccccatctccaagatgtcttattatgaatgggcaaatattacaaaatccaaaaactccaaaatttgaaacacttctggtcccaagcatttcagataaggaatactcaacctgtaccaacagtagtgctcatgcctcatcttcaagaaacagtgattggcccaacctcttaattcacaagaggagaaactgaggaacagagacccacaccccaaagctgtaccagcacctgtgtctcccagctgcttggccagtgctcaacccttttgtccatagttcttcatttgcaaatcctttctgccctgttgttacaaaaggcagctagcacagcaccagtgcctgccaccaagttggttcctcacaaatctttttaaatgaataaatgaaatgttgtatgtgttaggctgaataatgacccccaagagacatccagttcctaatccctggaacctgggaatgttaccttcaatggcaaaaaaggacgttgcagatgtgattaaaattaaggatcttgaggagattatcctggatcatctgggtggaccctaatgcaattacaagtgtccttacaggagagagaggggaaaaaaaagaagatttgtcacagaagaggaggaggcagtgtgaccatagaggcagagattgcagtgatgcaaccacaagccaaggaatgctggtagccaccagaaactggaagagacaagggacaggttctcccctagagccgctggagggagtgtggctctggccacaccttgattttggattggtgaagctgattgcagactccttgcttccagaactgtgagagaataaatgcgtgttgttttaagtcagcaagtatgtggcaatttgctacagcagctatcggaaactagtataatgtgcattgcgccactctgaaatctctgaagaattacagagtacagtctaaagctctgaagaatatagagtatcgtctaaaaggggaatggtattgaatataagatgaccagaagaaggaaggacaatgtgttgtagaggagtcagctgaggcctcatgaagcaagatttgcatgatctagaccagcagagagaaggacaggggtattctatcatacaccaccacatcaagcatttaatgatcacctactatgtctgtgttagagggcagcaagagtgataaaaatacatatgcaacagcatactttccctcaaggaaatcccaatgtagtgcaatggtacggcatgcttaagtgaaaaaataattagcagtatgaaatggaataattctccttctaggctcagaggcatacacacacacacacacacacacacacacatacatacacaaatgtatgtgcagggagacttatcacagcattgtctatagaagtgaaaacttggatacggcataactatggagcagcagaggattggttaaataattctggcacattcacgcaataaactcctatgtggtgtaagattcacgttgcatacaaatagccttggaaaatgcccataatatattgttaaatgacaaaagtaggttacaaaaataggatgtagggtttagtcctcccaaaacataattatagctacctacacacagagaaaagatagaagaatatacaccaaaatgttaatcatggttattttgaggtggtaggattacagataaattaatttcatcagtaaatatccactgaacacctatgtgctaagccaaggcttagcagactttttccacaaggggccagatagtaaatattttagcatttgcaggccatatcatctctattacaactactcaaccctatcgttacccaacaagagtagtcatagaatacatatacagaggaatgcacacaactgttccaataaaactttacaaaaacaggtaatgggctaggttggcctgtgggccataggttgccaactcctctactaagtaatcactgtgtttttctatattttccaaatactctacataataggcattactcctctaataaggggagaggcagtaaacttttttaagacactcaatatctattggccctgggaaagtaattattggatcataccacagtgagatgtcctctagttgtggcaatcccatttctccccaggggttaggcaggcataggaaggttgcaaaaatgtgattagagacccagtgtaaaacaatatgaagaacacaagatctgacaaaatatatccagattcattttttcatgttaatactaaataataaccatatcgcctccagcttatgactctggaaaccttcccagaaaatctcactttagttactgctggccctgctggattcaaacccagagcaggccagcccccactctgccatagctgtctccactttgaccccattaactcacactgaaatgaccagccagggacagagccactaatcttcattgagagggtgcctctggccatgtgtgcattcacctgacattaatagggtgcaggatgaattcccttgaccttctgatgagaatgccacatggaagaatatctaaggccaccatgccgcccaaatattttatgcacattgcggctactgcatgggatggaaagccactacatcaggctgagtgatttatgtttctgaaaaccacgtaagttattacccatgacctcatcctggcaactttgcaaattcttgccaattgatttttggaaaagagagaaagaaacaagaaggatctgacttcaggggtgtgtgtgtgtgtgtgtgtgtgtgtgtgtgtgtgtgtgtgtgtgtgtgttcttttctttttaaccttgtaagactctgcaaagattttcaaagcaaatttcaatccattccacaacagggactgagattagattttccaggaggtcagccagcagggcctggttgtttgaatgagcttcatttttatggtgcacatcaagcaacccctttcggtcatcactatcaattcctgttgtcagctggtcaagtttccaaataaactcttcaggagaccctctctgcctttgaggatagatggaggctggcaagacataagaaaagggctccagccaagtaccttctcaaatgctgagtccagcaaacttttaggaaaagcctcagaaaaaaatacaaaatcattatcgttgcctaatggcttaataatggattgcaagcctgaaagcagataatgttggaatatgcacataccctcgatccagtaaggctatttcatactcaaattccaacttgaaaaaacgagttctgggttagttccagccctgcctcaaggcattaacctcatctgtttcctcattcgtaaactgggattaatggaacctacctaagaattgtggtaaattcaaattaggtaatattaatacatacatatgaaagagctctgtaagcagtaaaaagttacgcaaatgggcatgatttttttccttggtatgattattattactatataagactctgctgcctgagaattagcaaaaaatcttgctcacacattcactaactgtaatattcacacaagatcaaccaaacatgaaaaagcttatatctccctttgtagacacatctcccaatgtcgtagcaaatttcaatagtcaggctggaatccaatcattcacacttcggctcagagtgagcacttactacccctatataaatctatttgtccttttaatgcaatgtgaaactctctgccaagctcatatttcatgtcttgggtcctgttaccaaagaggaaaaacacctcatgtttattagcttgtcacttggcagcataatgtagtgggttctttctgttccctgctctggcaataattctttgtgagacgtggggcaagtctcttcactactctaggtcagtcggtcagtggattgcctttgtggtcccactatgggccaagccctgggacttaaattctgcagaaagcaaggtagttggatcgaggtccattccaggactaagagcctactgcgtgtcaaccaagttggtgggcaatttcctttttttttttttttttttttttgataagacagggtctctctctgtcacccagcctggagtatagtggcgtgatctcggctcactgcagccttgacctttcaggctcaagtgatcctcccacttcagcctttcaagtagctgggactataggcatgcaccaccacacccggctaattttgttcattttttggtagagatgcagtctcactatgtggcccaggctggtcgagaactccagggctcaagcgatcctcctgcctcagtctcccaaactgctgggattacagtcatgagccaccatgcttagcctcaatagcttaatctaacatacctctgttccctgttttgccaaaaatcaggttatatgctcaacagtcccataggaatcacctctgggccaaggtgcccactacctatccagatcacagggagatgaactccagccttcaggccttccgcattcctcttccctcaacctccagacatttctccccagcaccaaagtgggttgcctagtgcagtctgctctggcaagaacacaacttaacagattctaacttccactgcactgcctgttcccttcgctttgactctcttatgttctcccttctgaatgaaggaggctgatgtagattggcttatcagggaaacaaatggataaaatgccactgaattttgcattgcagtttccaggaccaagccttttggatcctgaaagtactccataatagaatatataaaaatatcaacaaggaatataagagaggcacaaatgccagtgatgctgattcctttcattgtctgtgtttgaaaggttggggtgcactgtcaaaaccatgatcatgacaaggtgtgagcccacagcaccctcccccataggaagtgtacatgatggcaggcttctacagagccctgtccccatgagttacccccattcccacggtgaaactccaccactgccccagttttccctgaggagacaacaccttgattttcctgctattcaagctagaaactggccatcaccctgaccttgccttcccccatgctccatccctccccatcactgtgtcctatccgttctaccagcccaacacttcttctaaattcacaaattcctctccatctccactgccatcatcctagttaaaaatcctcattgtctctgacttgaacaaccacaacagcctcctcctaaactagcccccacatcacttttccccccttccaatattttcagatcaattcttctttagaacgcaaaaatcaaattcatgctaccactagcaagttcctattctcctccctctctacctctagcctaaacctcttcaatggatcatggttgcttttaggataaagaccaaaaccttaatgtgcttttaggataacagatcaagtcctttatgtggcctgtaagacctacgtggtgtggtctccacctctctccatagctccatcttgtcccatttgctctttgtgccctatctttcagtcccctagccttctctcttccccttcaacataccaagttcttttctgcctcagggcctttgtactgatgcagattcctctgcctggaatgcccttctcctctccacctcagcccctctcctattgatatggtttggctgtgtctccacccaaatctcaacttagattgtatctcccagaattcccacatgttgtgggagggacccaggaggaggtagttgaatcatgggggcctatctttcccatgctgttctcgtaatggtacgtgagtcccatgaggtctgatgggtttatcagggttttctgctttttgcttcttcctcattttctcttgccgccaccatgtaagaagtgcctttcacctcccaccatgattctgaggcctccccagccatgtggaactgtaagttcaatcaaacatctttttcttcccagtctcaggtatgtcttttcagcagcgtgaaaacagactaatacacctgtctaactcctatttatctcaactgtggtatactcacgtttggggaaattgagtaactaccctatggttttgctaagagcattaaatgagataatgcatgtaaagtgcttggcacagtgcctgagtattcaatgaaggttacatgtgcattataaatgtttaaatctgaaaattcattgttattcatgcccatataatctttctctctcttttctctaagttagtaactttatcttctactctagcaagtaaaatctcagggatactttcctttctctctgttgtttatttatttatttatttattttcagacaaggtctcactccgtcatccaggatggagtgcagtggcgtgatcttggctcactgcaacctccacctcccaggttcaagcgattctcctacctcagcctcccaagtagctgggattacaggcgcatgccaccatgcccagctaatttttgtagttgtggtagagacggggtttcgccatgttggccaggctgttctcgaactcctgacctcaggtggtccacttaccttggcctcccaaagtgctgggattataggcacgagccactgcgcctggctttctctttctctttcctttctctctgttttatgtaagtttttaatataagtttttatgtttgactcaaatactcaaaatcccctttcctcctaagacatggctaacctagttcatattgaactccctatttccatattcaatcattcatttacagattcatacaacatttattagcatctgccaggctctgtgctaggaaaagaatgtacaaccctgggagagactcaggagcttcccttgaggaattcggcagacactaacaaatacaaaaaatcacaacattacaatgagctaaaacaggggtacacacaaaagaagaacatcaagaaggaaaggaactcaggaagtaggggagatggtaggaactaaaagggccagggaggtttcactgggcatgcatgcctggcctcaaaggttggataggagttcaccaggtgaggagagagaaggcatgagggatatggtgagtgggcaaaggccctgaggtctggaagtatgtgacctgttcagggactggcgaggggttcaacaaggctaaaagttaagaagtttagcagggcatggaagaagctcaggcagaaagggctccttgtagccatatggtgaatagccttgaaggccatgttcaggggcttaggccttaccccacagtcaatgttacagaaaacctggtggcagcatagaggcaagtgaatcggtagaagagactagttagaaggctactgccatactacaattagggacagggagactcaactaagacttatcaatcgagctccttccatcaagcaggtattccacgtgttgactgacaaatcctggtttgctaacttgtacaagaaccccatgcgtggagtgccacagggcccatctcaaatgcaaaggttcttgtagtagagttcacacacagcatttcccttagactgcccagtttagagtcccgctccacctgtagttggtgataagagtggcagtgatgtgaagctgctgctataatagcagggactttatagccccaagcgaaaccagaggtgcagacaggtaaccccagcatcaatttctataactgatttcaaaaattaatgaaaaggaagccagtctgggagaagaagtggcctctaagtgaaatataagtttacatttacccctcacctggtgaactcctactcatacttcaaggcccaattcagatgtctcatgggagatgatgagatttcatgagaaagcttggcagagttaagggaagggcttcttccacaccttggcttagcacagggatggttctagagcaacacagactgatgggaacacaggggcatctgaaggtatgcagacagagagcaccaggaccaggtgctagaagaggagcgggaaccccacaaggtacaccctgcagggcgcgaggacgatgcgtccctcttgggtgcttggcaggaagcagaggtcaaccacagcatgagcagaattgttcatgtacacgtgagatgcctctggagacctgacgcccagcggtggcagcctgctgtgatgcaatgtaggctatgagtggcagaaatggaccccctccacgcacacctgcagtttggtaagaccagagacgtgtgggatgtgaaattaatccagctagcacttaccaagtactgaatctatacccaactctacatctgttacttctaaaactttccctacaacacagacaataccattcccattgtcaagatgaggaggctgaagttcagggagattaaataacttgcccaaggacacacccccatttttacttcttacttttgcagaagtaaacacaaaacaagaggaatgctttctggaagtcagagcctgccaggcccccaccttgatttcttctactgtagaggacaagaatatggggttgtggcagccaccagagaagtggggtaaggggtcagtaggctcaagggttgatcatactccagtcagattcaaaacccatctgtgcgaggcagtttcacacacctgatctcatttaacactgaccacaaacctacagcagcctaggactgggaaacggtggttgagttaatgaactcggctgtcaggtgctgtagccacaacctgagccccggactaggtgagcccagactgaaggctccctgcccctaaatctcagccacctcagcttgtcactcatcagtgcatcaaaatccctgattctgggcacagaatcattagccagatgagcccttccagggaagattccaggcagaatgattcatgagagaggaaagaaaaataacaatgtgctcgcagcaagaagcatccaagcgcttccttttgctctgcgggaattggatgcattctggcccaggtgtttccacacagccgtccagagtggtggcctctggagagaggtgaagcctccaggagaaaggaatgcagcctgtgccagagccactaaagcagatgacatgggcaggccagggtccaccagggctgtgatggggcccagaccctcagatggtgtcaccacactctggcctctccctcccatctttcagaagcccctctgcaaagtttgggaataaaaggcattaagcctcacctcccacgcctgagattgtctccagagccagggaggggctgttttgttggttttcttcctccaaagccagtgagagaaatacccacggatccagtttagcttaagtgtccaagagaacctccattagcatctcagggaggacaacgctaatcaccaagggcatcaacttcagggagggagaaggaggagcaggaggaggaggaggataaagggatgagggcggagatgcctgcctctcctccagaaacgccggcttttatttcagggactggaagaagaaaacgccctagaaaaaccatcaaccccagcatttctctgtgctaggcagaaaacaagcagaggaatgtgtgctacaagcaccagcaattttgggggcagtgcctcatggtgtcatgcaggaaaagaacatctaggaagtcttgtttgtcattttcttggactctggaagcatcttttcagaacagtttactcccaaccatctcatctggggagacagaggaagtgccatggggtgaagccagacttgtcaaatagctactttggcaattatttgaaacagggtacccccatttccaataataccttacaaccacagagtgtttgatatttttttgaaatccatttgcatccattatttatttgaccccacggggcctccaatttacaatggagaacctgagatatcagaagcctgggacgtggggcctgggacatggggcctacagacaggttcctcatctcatagtccatcctttctccactaccccatgctcctccccagttctgggggccaagtgcttctggaagagcaattctgcttcccatgacacagcactttacagtttgtaatccttccccaaacctgagagtgggctgaagaaagaatggattccttggaattatgtgagttgagcagcatcaacatcattcccttatttctagggaatgaaactggagactgggtatgggggctcactcctgtaataccagcactttgggaggctgaggcaggcagatcacaaggtcgggagttcgagacgagcctggccaacatagtaaaaccccatctctactaaaatacaaaaaattagccgagcgtggtggcaggcgcctgtaatcccagctactcaggaggctgatgcaggagaatcgcttgaagccgggaggcggaggttgcagtgagccgagatcgcgccactgcactccagcccaggtgacagtgcaagactccgtctcaaaaaaaaaaaaaaaaaagaaaagaaaaaaagaaacctgaagctagagagcccatctggcacatgtgtcttcccctaggtcccagttagttgagagctggccaagttcattaactgcacctcagtttcctaatcctaagctatgacccaggacttttgatgtcccatgaggcaggttaattgcattaatagccccacttcttcagtctctccttgtatccataatcgttgccatgtgtctacaattcctttctcactaaaggggcaaaatctagttccccactccttgaaacagagctgccctgtgacttgctttgcccagtagaatgtgctactccagctacagtcgggctccaagatgccttgagtgtctctgtttgctcttgcacccctgccatcaccagcagcacatgtctgggctggcctgcaggagggtgagggaaaaagcagtggcgctgcactgccctagtcaccttagccaaacagccaacctcagacatgcaagtaatcccagccaagttcaacagaactgcctagctgacctccagataactccagacatgtgagcaataaatacctgttactgatgtcaccaaggtgatatggttgtcacgcacaattctacggcagtagctaacaggctcaaaccacctagcacctgtttcccccatctattcatgcaccccatccagccagccatggctccatccattcattcaccatgggtttgttgagtgcccccgacgtgtccaataccgtgcaggtgctggggaaacagtggtgggcaaagaacacacctgcccctttcttcatggagtaaacagaccacgaaggaggactgacaagcaactgtaatccagtgagatgaacactgggatagggcaagtgcagggcacagggtggatacagggaggtgagcctaatgagatgagggggtgccagggagatcaagagggggtcccgaaagtaatggcatctcagctgaaatctaaaggctgaagaggagtgggccagggaaagagctatggggtgaggagaggagggtcagggagaatgtccccagcagaagacaccctgggcaaaggctggaggaggcaagtgaccatctggctggagcccagaagtaagaaggtgggagaggaaaagggagcctggagaggccagcaccgagaagacccaatcttcatcccaggcactttttccatgtttattttcaaggccaagttaaacccggaagagatcatagaaacttcttccatgcacagatggagaaaggaaggcaaaggccacagaacactttcagtgtacactcagaagggcagggcccaggacagcctctgagggcagcaagagaagccctagacagtgggccccactgtaaggaacatctgccacccacctaaagctgcaggttctctgctgtttctcatacagggactgagacaggaattgaaggtttactactaaaatctacagccctgggctacagcagcccatcagaggcaaacaaaagtatgctccgcctctatgaaggaaaaaaaaagggaaaaagaacatctcaacggaggctgtgtgttgtggcattcattcatttatccattcattcattcagccaagaactccctaatggaccacatcttgcaagccccagatcacatgctatggaggactgaatgatggctgaacctcagtcctttcctcaaagaccttccagtctagaagaaactgggtcaactccagactttctacataagcagagcttagaggtggcaatcttttggaagcagacactagggaaattgtcttgaggctggttgagaagaatgagactctatttccacttagattatgtctttacctgggatggcttgaggaggtgagggtacagaatgccatgcagtacagtcagctagtggtggggtggcaaagagattcaaatggagtccagggggtccagaagaaggcaagatgggccatatctggctgagcacatcaggcaaggcttctagaaagatgagtcaaggactgaggagaatgggggaagagcatacgggggaaggaagcagcccaagggcacggaggtggggagcccagaacttactggaggctcgttcgggatgtttggcatgcagccatcaacaatgtggagaacgtggaagggcagctggagaggcagcctggagccagaccaagaaggtcccgagatgcccagagaagaggttgaactttgtcctgaagacaatgatgagtcagaggatgtgacatcagggatgcattttaggaatattaatctggccgactaacgagatgggttggaaaggagagaatgaagccaagaggagcaattaagaagacctgccagaactggtcagagaagaagagacagatgtgaggaacacactctaaacaactggataactggctggatggaaacagcagagccaaggggcatcccaacatttcaagtctgcaaggatgactgtgaagttcccagcaacagggtcagcaggttggagggaagtggctgtcagacatggtagggttgaattgtctaggggtggccagcaaggagctcaagggagagccgaagtaaggaaaggtattgctgcctttgaaagcccagagagcccaggacagggtcagagataagcagaagcaggcaacgggaatccagttggaaaggaactgtcgaagctgcaagggagagagaagacaaggatagaaccgggttcctgggcagagcccctcctgctcctccccacatcatccatgtgtcctatggaaatgctgttctagatccccaacctctgccttaatggtgtcttatttatttctgcacagctgggcctccctgagtagaatgtactctccatgagggcagggatcattgtctgtttgattcactgctgtatcccctgtacctagaacattgcctggctcatcataggtgctcaatccttgttaaatgtccttgttaaatccttattaaatgtcccatccacatgtgcctgacttggccacaacctctagaaaggggaagtatgggtagccagccatgttggcataacatgatccagccctctccctccagcgactggaccaggaatggatagtgatccaaggtggagatgggagagggtgtccactcataggctggcctcagccagccaatatttctctctctctctgtgtctctctctctctgtctctctaacatttgaaccaagacacaagagttgagggcagttatgataggtacaagccctaaagccacgcaggcccagctgacggccaccttgggccaagtgcaaagtgagcagggggaggaagccagtctgcagagacagaggctggagagtggagcagacagaagcagagacaaacctggcatagcccctgagagacgagcagtgtggcctccattcccaagcttccagttccatcaccaggaggagaggccgaactttgttctcagtccctggacattgtggtggtctctgtgatgggccaccagattccccttcaggaaggaaggccttattcctcagttgctgggacaggtactagaagactgtccttggctgtcagccttctataaagattgccttccagaggcagcccacatccacgactgatcaacatgagggtataacttgggacaactctgaagggcctctccaagtcccacagtgccccgtggagtcagctgaggccttcattaggactatatcagagctcagcttctcgctctgcccagtcctgctgcctttgcctggcttccacagtcgttgatcccaatcaaactctccagtaaatgccccacatgctcatttctatcttagcaccttccagggagcatggaaccccacctgtgacagctgtaacgttgcgttttatatccttacaataaactcttgttacctcacccagtatgagtgagtcttgattggactgatggtacagtttttgcaaaatccattttaattgcaatgactccttcttttgcatttcccaagagcacttactacagtgctttgcaaataataacaataataataataggtaacatttactgagcaaatactatgtgctaggcatttgcctagcattttacaaggatcatttaatcctcacagcatccttgagaggcaaatactattatctccattttacagatttatagagaaaaaaacctgaggcataccgtctcagagtcacacagttatgaaaacccaatccactcaacatatccttacccacattctaccccatctcctccaacaaggacactcaactacaatgccaaagaaagagtcaatgattttgagctggatgggggcctgtattcatctaggttagtcattttattttgttaagacccaaagggatgactttttaatttaatgttcaaagtcatgcaatgcagtggtaacataggaacatttaacacagacataatcaaaatatacacatggagggaaagagagtgacaaaaagatcttttaaataatacatcttgctatatgtactctaattatgacatattattgtatacattatacatatacatatgttatcgtatagtgttgtatgcactaaatcatgtgcattatattctaagggcaattttagggactgtggcccgacaggctgactttggaattgaaacccctgtaagatgggatctgcctctgaagaagctgacagcaagaacagggcagcagtccggggctcctgactcacgatccagcttccccccaccactcccacccacgtcccctccacttgtttatctggtttgagttcaacaaaaccaagccagctctgagcactgaagcactgccatttaggaaaattcaagagctgagacccaagctcttgagaaatccacgtgaattaccccactgcagccccgctttccagatcactgtttctaattaaagccctggctgacacatgacgtagctccttgggaagcatcccatcacaccacacactctcccagatgtccctgggtttctcctccttgcctttttcattggcattctcaccctcatcaccaaacagtgttcatttcttcaccaccgccgcccctggggaatgaggtaagacgctaaacaacgtaactcaaaatagactggcttccagctcttacaggagagagggcctgaggatacaggatgagactcaaatatctcagccccagtccacctcgcctccccctgctcagccccaccccccatcaagttcaccatttcccaagacattgcagcttcattcctacctctacgtctcaaggccccaccccactcctctccagttacttaaattccatccttccttcaattcccagtataagcaccaactcctccgtgaagactttcctgttcacgtgatagaaaccagagagcccaaggaacatgaagtatcaccaactgcgggctgagcggccaactgaagttttatttaacatatcaagtgttgcagagctcagggtgctaaaattttttgttgcaagctctcaaaagtcaggacattccacataaaactggctttctggattatcttgaaaaaaccagtgatctagaaacaccaaacttccttcccacaatgcaacaatgaaagggagtagaaactgccctctctagaacttttttttttttttgcacaaaggtttagctttgcttttttgctttgttctctttataatcaatggttatataaatttgcaaccaacatatttcatcaatctccaggctcagaggtggtttgttttatgttttttgttttttgttttttttttgcatcctgttttttaatctcaatattcacttttcttctagatgaagttgatcctttagtatttctttcagcaggcctcggtgtgtattaaagtgtcttctttttgtatatttgaaagtgcctttatagcatcctcactcccgagtgctagtttagctgagcgtggagttctggctgacagttagactccctcagcattttcaggattcttcctaatggccttttggcagctggctgttgctgatgggaatgtcaggctagccgttgtccctttgtaggtaatttgtcttttctctctggaggctttgagagtctctctttggaggtttgcattttgaagttgcactacaatctgtctgggtgtggatttatttttgtcactcatggtgatttttcaatcccagaactcatgtctttcttcaattatgggaaaatctgcattcaatatcttagcaaatattgcttctccttcattccctccattctcttcttctggaactctgcttggcatatactggaatctttccatctacttcctgtgtctcttaactaatctttcataatttttattcattgccccgggttgggtctctcatgaattcctcagcactggcttttaattcactaattcttcaattatgtccagtatcaagtcaatgtcatctattgaggttttagtaataaatctaaaactatattctgtatttcctgatttctagttgattctttttatatccggtgttcttgtttggtttctgcctgctttttattttattattacttattcttttttatagatgctattgctttctttttcttgagacggagtctcgctctgtcgcccaggctggagtgcagtggtgcgatcttggctcactgcaagctccacctcccgggttcacgccattctcctgcctcagcctcccgagtagctgggactacaggcacccgccaccacgccccgctaattttttgtatttttagtagagatggggtttcaccatgttagccaggatggtctccatctcctgacctcgtgatccacccgcctcggcctcccaaagtgctgggattacaggcgtgagccaccacgcctggccaatgctattcctttcttcagcccctgcaggatcctcagtatacaggctttgaagtcattattagcttttgcttatttcttatcatcagaagtgagtttgggagggtgtcaggagggtttttgtgtgtgttttgtttgttttgagacagggtcttgctctgttgaatgggaggtttgttttgtgtttgttgcattctctctcaatctcactctctgctctcttgccctctgccattttgcaattggcttgtcttggcccagcagagttcccagtgcagaaccagaccctgtggcagctccgggcttaaatcccatggtgatattggggacattgcaggtcttgacaatgagctgctgggtggcttagccaggtactgtctacaaggatgtgttggtatattactctgccatagccttagacatcaatccagagaagctttctttctaacctcctttcccaggtcagggagcccaagtctcaccccaaatttcaagtaataagcctggtttgggactctgcctgtcaaggggcactttaagacccatttgctttcccttaatgtattccagggaagctatcatttggtcttgtcactaaagcattgaggctttggcccaggagtagggaagaactgcactggcagggaagcaagatctagtaacgtatttcccaagggacttggactagttctgggagggtgacagcagtgaggaaaagcctgagtgtgtatttcaacagacaggaggcagccaagcagagcagggcctagacctcaaaggggcatcccctgtacccttcattcccaaataagtaaaaatatttattaagaccctactctgtgcccctaagcaccctagttttctttaatattccaagtatagatccatgggttgatctgaacctttcaagatgtttctatttgtagtggggtatgtttcttgagcataatgaatactgtattagtctgttctcacaccgctaaaaagaacaacctgagactgggtaatttataaagaaaatttataattgactcgcagttgcacaggctatacaggaggcgtgactgggaggcctccagaaacttataatcacggcagaagggcgaaggggaagcaagcacgtcttcacatggtggcagcagagaaagagtaaagggggatgtgctacactcttccaaacatcccagatctcatgagaactcactatcacaagaacagcaagggggaaatccacccccatgatccaatcacctcccaccaggtccccctccaacactgggaattacaattccacgtgagattagggtggggacacagagccaaaccatatcaaataccataagagcaacttaaagataataacaataacatgtatttgttgagtgttcactatacactaggtactgtctaagcactttacacacattagcaagttttagccttaaaacaggatgctgttgtccttattttatggaaaggaaatggtagcttgcccaaggcccacagttggtaacggcagagtaatgatagagtctgtccccagagtccctactcttggccactataccactgaccttctctaaattatgctgggggataccaggaattaaagagaatcctaagaggaaaatgaaacccaggctaaacagttgaggacaacttatacatctataacccacacatatgtatatgtcacactgttaaaatacaaactgctacagtcagggggacaactaatgatgtgacacaggaagtaatcctacaggaaaagttttcagctcgagggaagattcttcaaggggagactcagacccacaagtttctcttttactactcagtgaataacagctgttgttattttcacctaatcctttttgtagtctctgaaagtccacctaaaataacccttccaggtattatcaagaagtactgcccctggctgagcccaccaggactgtcaggacaaccccaaggctgtgctccaggagcctgctcgggcctgtaacaaattgtaaaagagcaaagctgcttcctactgaggtaggaccatgtgaccaaatcagggcttctctccggctctcctgtccgctcaaacctgggagggttctgtaggatactattacagaagctggttctttacaaggaggtggggtggggagggattctagtcagattggaggtcttattagccaggttctccttgaggttttgctcaaacgccagagaagggcagttgctcattcacatgcagccccctgttaatgtgactagacatataggtccactgtcaatattaaggcctttcagctgtcaccagtggagtttatttcacagtcatattccctgaggttcacatagcactttgctgtttgaacaatcatgttcgattgtgtgattgaactgattctcaaaaatacccccggtattcattcattatccccatgttccaggtgggaaattatcccatatcacctgcaggtcccacaggcagaaagtggcaaagctggggctcaaatcactcacttaaaccacctctgcagagaaatttaagaagctattctctctctttgcacagtagggaaagcacagaatctcagacagactaacgcagttgttccgttcctcagatcccatttgcagtgcaggtctgagtctctcctgtgggactcaacactacaaatcccttgacaacaggtaagctctcactctaacctgcaccatgacccacaactcaggcatgggaaggcctcagctgcctgcaggaaacatagccgtgggctgacccaaatgaaatgccctcccactctccaagcctctctgacagagcccatcggcagccagaggaggaagagtctcccctactcaccctagtctctgcgctgctcacatgcctgagatggagctcctctgataccagttctggcccaaacaaggtcaaagggcaccaaaggtcaaagggcctctgttccaggttccaactcgtgttctgtactggggtcctcgggccatcactctctttgcctgcccacctagaaccaaggtgctaacacctgcctatcccaagaaccctccccaccacccaccatcccaccagactcctgttggtatattcccagcctcggcccatttcttggtgcttgtcagtctgtgtagatccctgatgatatgtcctctcgcttttcacatctgctgactgtcctgacgggacctgccttctggggccaatgcttcaaatcacttacctcccccggccagctcgcctggcctcaccacccacctccttcttatctctgccacctgggccactgtaggacaccatcattggatctatttgtctttcacttaacaaataatcagcaagcgtgacagggccccctgccgccacatcagtgagagagataagggcaacaaagacacgatcctgggctacataaccactcaacagttaaagacacataacctgggttttaaacaattttgtgtttatcccatgacacacagtttacccatataacaaacctgcacgtatacccctgatcctaaaataaaagttaaaatcataataatgttgtgtttatattcttgccttccaagtagacaatatgcccctgagagtaagaaccacatctcacacttgtcccactttgcctcccccaactataagtgcgccacatggagcctttccccagtgcttgccagaagaggccaatactgtcaccctgcccgttatttttttaaatgatgatatacactgcaaaatgagaatatggaaagcagaagatggaagaaggaagagggagtctgcctgtaaggcccacctgagaaggaatggacactcatctctcccatcatcatccagcctgcctcaggatgctttccaaaaaactattcaaggccctgtcagatcaggtagtggttgagaatgtaagctctggagccaggctgcctgggttcaaatcccagtgttaccactggctacctgtggccttgggcaagtcatttaattgctcagagtaatacctacctcacagggttatggtgcagattaaagagtgaataagagttaatatatgttgtggtggttttataatactaccataaattctttgaccttctctctttaaaagagacctaagagcatccttcacctccccctaagtgtgggacatatttagtgacttgcttccaaatgaatagaatatggcagagttgatggtgtatgacttccaagcctaggtcatacaaggcattgtggactcctccttattttttctctgagggagcattcaacctggaagccagctgccatgctgaggatgctcaagcagccctatagagaggtccacgtggcgaggaactcaggcctccagccaacagccatgtagtcggccactgtggaagctgatcctccagtcccagttaagcctttagctgactgcagcactagcaagatcttgactgtaagctcatgggaaaccctgagccagaaccatccaactaagccattcctgattcttgacccatggaaactgtgtcatatgagaagtgtttgttttaaactggtacattttggaataatttatttcacagcaataaatattacatatgtgaagaattgatatacgtaaagggttaatagagacttggaacagtttctggcttacacaaagtgcttaatattattttataataataatactaggctatgtactattccccaagtttatcacacattttaaaatttagaaaaatacaacttgagcaccaaaataaataatgattgtaatggatataaaccattgaataaaatagaaaataatgagtccatgctgatataaatgaataaatgaaagaataaacaaacacataaaggagaggtaaaagctctatcttgcagcagaattccaaatataatggtagaaggaatgatggaattataaaaatcaccatttgacaaaacatgctaaaactagagggtgaatgtttgacgaggaattgaatatttatgcagtctcaaaggagtgcctacaaaatgcttattaaatactaattaattaatgagaacaaaatacttgttaattaactttgcaacggagaaacctggcagataccaccttaatcaactgataaatgtcagtatcaccagtaatgggacaaatcaacatcacatgactgctgatatgctccactgaaaagaactcccatgggccagtgcctctcttgctcatcgctttatccccaacagtggttcatatgcaggggcagctcctggttcctgggtgctgtgtgccagacactgcaccaaaaagcacaagacacgtgtcatctcattggatcttcacattgcctctaagctctgagaagtgaaacaacttgcccaaggtcacgtgggctggaagaggcagagataggatataaaccctgctctatctccacattggactggctcccttgggcactcaataaatgctgaattgagtcctttctgcagctccaggaggtttctcggaaaccagggtagttgcccaggacagagttgcattctcctttcctttgataaatatcagtaccaacaataggagggagaaaagtgctagatgtcgaatccaaaggttgcagtttcagctttgctcctcatgcacagggatctcactcatgctggctgggtctccatctgccccaactttagaccaggccagtagctttcaaacttcttttaagcagccaaattttttttcaagcaaacctttgtcaaaacctcaatgtagcatcattcacaacagccaaaaggtagaagcaatccaagtgtccatgggtagatggactggatgaacaaggtgtgctatatccacatagtggaatagtcttcatccttcagagacaggaaatcctgtcatatgccacaacatgaatgaacttgaagacatgctaagtgaaataagccagtcacaaaagacaaatactgtatgactctacttacatgagagacctagagttgtcaagttcatagagacagagagaggagtgctgggtgccagggactgagagaaatggggagtgggtttcagttgcggaagaaaaaaaagttctggagatggatgtaggtgacagttgcacaagaatttgaatgtacttaatgccactgaactacacacttaaaaatggttaaaatgccaaattttatgttatgtctattttgccacaattcagcaaataaaaataacctcagtatatgcaaagatgaagcaaaaatagggaatgggatattaagatgccccctttacacacctccccccaagataactgcaaagaatcctcctccctgaggagtacatgggcgatttcaatcctaatatttggggctctgggagcaacatctgcctgtggaacttgctgccaacaattttgaatcctgagtgatccctgctccttctggtccacttgcaggcccctgggattaagccccgccagataaaccacagtgagggcaacacctccaacacagggaaaaggatgacctggcaggtgggggcacacacagcgtggggagctggccatgggtgaagcaccaagggtgggcaaggctaaggagcatgagctcttagagcccagcagcatggctggaccctgggcaagtgattaacctcactgagtctcagcttccacatctgtgaaatggaaacaacaatgggagtacttaccttgtagggtgttttgaggtttagttgaaatagtgtaaatgactccaaaaggggcaagccagtacagcagaggcagtgtctggcagtggatgaaggtcgggatttggaggcaggctgaatttcagtctcagctctgccacttatcagctctgtgattttgagaaagttatttaccctgtctgtgcttcactttctgcatccataaaaagagggaggtcaccgtacctgcttcttaggtgattatgaagactatgtgggctgatacaggtagaacaattcctgggacacagtcagtgttcaataaacatgaacaatcgctgttaacatcatctggcccaggcctcagtctgtccaggctgccctggctgagatcaagagggatggagccacatgagaggagccagtctgtccgggccaaacccaacacaggcatcagcgcccactctcgtgggagagatcacttccaacctgcggctccaagctaaggcggcagggcctggggcctcctccagggcggttcaaccagcgaaggaagcagaaaagaaggaaataagactgttttccagtcttccctcaaaaacaagcagacggtgcggctcccttcaccggcctgacatttgctcggcttttggtattgaccgaaggcgttttgaatgtggctgccccttggccttcccctaggtcttggcctgtggctcatcactgaagtggggctaaatttaagccatgcggccactcaggcccagctagaaggctgccgctgtcaaagcagagggggcaggggaggtggggtacacaggaaaaaggtggcagaccccaaagggcttccagatgttgggatcggcctggcctgaaccactgcaaggatctctgctccatactcctagctgcaacaggttgtagaaataaggcctctgcacagtcagggctggggtgagtcagagaccctgggatcccaccggtgggaaacatccctataggaaacactgacactcccagtggaaacccttgtcattgtcaccactggggtagactcagctcaactccttgcagatgaggaagttgggacttagtacccattgtttccattgaatgcgcacccactattccaggcaccgtatgaagctcctcagatgtagcatctcctttaatgctcccagcaactactattcttttttttttttttttttttttttttttgagacagagtttcactcttgttgcccaggctggagtgcaatggcgcaatttcggctcactgcaacctccgcctcccaggttcaagcaattctcctgcctcagcctcccaagtagctgggattacaggcatgtgcaaccacgcctggctaattctgtattttcagtatagacggggtttctccatgttggtcaggctcaatgtcactcagcaactactgctgatgctgagcttggaccccaaatctcctgacacccagactattttatttatttatttatttatttatttattttgagatggagtctcactccattccccaggcaggagtgcaatggtgtgatctcagctcactgcaactccacctcctgggttcaagcgattcttgtgcctcagcctccagagtagctgggactacaggcatgtacaaccatgtcccgctaatttttgtacttttgggagagacagggtttcaccatgtttgccaggctggtctcgaactcctgacctcaagtgatctactcacctcagcctcccaaagtgctgggattataggtgtgagccaccgcacccagccccacccagactattttacaaaatttacacacactcacagatgcacacagtttttctgaaaaacagctcagaggcatctgatatcacatgctaagcatctccttgctggttgaacacatatcatcttccttgccaaacaatataggtatttcaggtaaatatcatggccactcagtacttcagatagcctctactactgtcggcgtctacagtgttcataccacaccttgaggttaggtgatcttccctttgatccacagagaaatcctccttttacagataagaaaacaggtaaagtcatgcttggtaaataagccagtaggaaggttcctgtggctaccaacccagtgccagcccagtctgtttccctgctccgtctctgggtctccaggtgagtggagtcccatgatcccatacattttggagccagcacctgccctgtggttccccttgggggatgcagaggcaggctgggcttagctagggtcgaaggtcaggcctttgagccaggaggatgccccagggcctgggtctgctggcagtctccagtgccacattcagaggaaaaaagggggccccccagtggaggcctatcttcctgccatcttctcctaccaggaagggagggtcatgctacctgggtctgggaaagagccatgctggagcgagatgcccaccatgttggccagcaagtcaggcagccatggggcccttcccagggaaggccccagcacaagcctcatgtcctgctctggagagaaacctgaagtgcatgagtcccttccctgtccctcttctctgctcctaaccccctccttcatcatccctgtgagccacaaaccccaccaaggcatcattccttcctcctggttctctcagactttccgattcctttctgatctttctgtttcttctgctctactgcaaagatactgcctcacaggcttagctctttccagggttctgatcacgtcacccctcctgcttaaaacccatctgtgaattctcttagttcttaggataaatgccaaaatcctcagcagaacccacaaggcctgcatgcttgtcccgattacctctcaatcctcctcctccttgccacctccaccctgctcagccacacctgtgttcttcagtctttccatccccagagcctttgcatgcacggttgccttggtctgcagcgctcctttaacctggctaacacccattcagctccctatcaccatttgtccttccttgaaccctcagctaggtcagatgccttgtgaaatgctttcacagatctgaattctgctccttcagagccttatctcaggttgtaatcatacatcttatatatgtgattatctgattaatgaggaagaaaaccccatgtgagggggcactgtatctgttttcacttatcactgtatcgccatcaatcaatacttgttgaatacacaataatgagtgagtagtgaatgaatgaatcttctaccctactccccaaacccaagccttccctgacaccaccattcccatcacagcctttgcctgtgaagaatctccatctgcctgctctcatgtgtctagtctataacctttcttcctccttggaagaccacatccttcagttaatccttccccactaggtctgagctccaggaaggcaggcatcatgcccatttccttcacctctgtaaccccagtacctaacatagaagtgttctgtgaatgtttattgaatgaatgacttctcatctttaaagctatctgggccacactgctagatggtcccacaaatttggttatcctctttgttcacaaagatagaattttagctgggctcaccactgcccccaggaaaaaaatttcccagcttcccttgcaactaaggatgcccatgtgactaagagttttccagtggaatgtgagtggatgtgacggtgacccagcctcaacatgcagatgaatgaaacatcctagaaaatggcagagcaacaatgtagaaggaacgaggaccctgaatgacctcatggagcagagcctccaagacagcttaagccagagagaaattgacttctatcttattcaagcatagtactttggggtgtctctattctaactaacacctcgttatttacagacctccaagccacagcaaatgtaaacttggctgccagcacacagccttcctcatgacttccactcttgcagtcatccagggccacagaaatatccatgctgatgaccagttatcaccctgacttcatttcttcatcctcactaatcaaactgtcttccattccatcccttcttagaacttactcatatggccccaccctgaccttgtcaactcccaggaactgccctacctctgaaatcctcaactagaaaccccctctttctagctacaacttctcatccctctgtttctacctgactcaactatccctgttcttcagcctcctggagacccctagtcctcgggctcttaatccttctgcgaaccagcagccttgagagacatgatgctctcccaccatcagcagaagctcacctgtgacagcaattctcctgggcaggagaaagggggaggattgatcctccagggctgagggtggtcctgcagtggctttttcagcctccatcctacctgccctcactatagccttgccttgactgctcactctccccacaattccaatttggatcaagacacagaggccctgactcatcctgctggtttcccctcactgcctcttcactctctctctcattctccattgctagttcccttctgtacttacacatttgacatttgctgcttcccaggagtcatttatcttcctcttctctacctatgttcccctgcagcaaccctccccaggcctatgcctcactttgcacacatgctgacatgcccacatccatggcccatccactgaccttgctcctaaattctgggagctgaattccctgctgtcaacgcctagggggggagcaggaagttgggaccgcattcctttcccaagcccctagcttttggccagctctgtccttgggatgtgctggttttaagaaacatccccagatgtccagggtgcaacttcaggaaggaggagaatccagctcctaaactctactctgcagcatctgctgaaggccatcaactcatcccacttcagattgaaagcaaaagctattttctctacttctacacaagagcccagcctagatatctttcagtcctcagcatgcctcgctgttttcttcccaccctactcctccctcaagactgcctccaagcgcactccatggtgcatgcagaagcagaaaatacctccagggaactaaatccacctaatgacaaataatggtagctatagcatttgtacagccatttccaattcacaaagtgcttttttcacagacattagctccttgattccccaccacaagtctatgcggtaggtgacactctccccacttctgcagggcagtaaaaggaaacccggagaggttaagagacacatccaagggtataactagcaagtggcagcatgtctttgtcaacaggagtgcaacgaagtcagaagtgaggtctaaaatgcagtcttgacttagcccaatagcccatcaaagacagcctggccccaggccctctccagtcctttgcttggatctggacaaactcagacatttcatcctaaagccccatttttgccagtggcaggagcccaaccatcgtctctgctgttagcaactgctccaagtgtgctcagaagtcacctgattggtcagaagcaaccccaccccgctcaggactggagctgaggccctgcaggagaatctagtgcacgtgtgccctccctcactgaaaccaaggcccagcacatcacgcatgagcaggatgtgcagttcctgcagctggtttcagaatgaatcctttgtttccattcacctgcgctttttaacatccgcttaacaactttcaaaagcccaaaggtggcagaatgaaattacttagaataaaagacattccaaatggagacctctttctgggttttcagccatcttttcgtacgtgcttggaggcaagccaactaaaagatgtgtttcttaaaccaagtaagctgttaagtaacaaactggtcctgcagatatgaggaaagagagaagggagaaaaaggaaaaacctattgattcataatctctcattcattcattttttgggcccctactcagccagactggcacagagtggcaacatgaatatgcatatttatattctgatatgttacagtggttaggagcatgaaccctggagccagaccctgtggtgcctctccaggagttagagaaaggtgtcccttcctcccaacagtcacagctctgcacccaggtgagagcaagatttcagactcaactgatccttccacccttgtggacccttgtgcagtgcatggccagcacaactgtacatggtagcactgatttcaatcccggctcgttcagctattgtgtaaccctgggcaagtttctgagcctctctgtggatctatctgttcatctaggaaatgaggatagtaatagtatctatcttacaatattggggagcatgaaataaaataatgcacaggaagtgcttagcacagaacctgactgcaaagaagcactttgtaagtatgattataatcattatatatgagacatagcccctgcccttgtggagttgacagtctggtgggagaggcagattgtaaaaacattatatctgtttatgtccagggttggaggtggggtagcaggacatgagtgagaaaactgctcttgatgggtgagtaggaattcaagcagcaaagaaaaggtgggcgtgggaggaagactattcaaggctttgagaacagtatgtacaaaggtagaggagttacatgtcattgcatgttccaggaacagtgagaagttcccacactattaactactaattatgaatttctgctaagctgaaatgcacaataagtgagtaaataattccctccagtgccaaacttatgagtctcaacacttgggaaactcaaagtagccatacttggcatcaattaggccaacaccttgtgaagttgacaatggctttgaattaaccaataccacatttctcaggttactccaggacctggaatgttattgcttgctagagaatcactaaattggagttccctctggtacagaaggaaggggatcagtgctttctgaaggggaggatgggttaggggggaaaagccttggaagtcagggttcctgggttcctgccccactttctaggcaagtcatggtcccctttcctgagcctcagtttcctctcctgtaaaatgaagggggctgggttggagtttcttccaactgggagacagtacacctaactgcttacagcctggactttaaagtcagacaagcctgtgttgacatttgttaagaggacaaaatgaagatttaatctatgtaaagcacctgacaccgccccacaggaagcacagatgaaatgatagaagatttgatcactgccgtttagacagtgctggtgtgtgggatgtgtgggtgaatgtccgtagaagaaaccgcccccagtctcacacctctcaaatctacaaaccaaaactctttgacacttgggaagtttttgagcctgccgaagccctgcatcacgtcagtgcaatgaactccatacacttgagacttggtaacattgtcttagtatttggcttgaatgaactttctgtgtttttttacgtggaaaacactcacatgacagcctcggagtagtagtgcggggagcagcggggtgggggcaagagggttccaggggaaagaaactctccagcagcaaaagaatgtgactcacactctcacacaacagaagagaggcgacctgagcagaggtgggctgctttttaggaagtcgcactcaaatggtcttcatggctccaaatggggagaaggttttagcacacagtccctgaagactcatggacattcccggtggttctgattgtgaatgatgctgaaatcaaccattgcaaaatactcccagcataccctttcctctgcaccttcgcccagcgaggcagatgctcttatggagctacttcacaagcgtgggtctgaggcccaaggaggtgagggcacatgcccaggtcacacaccacagatacctgccctcaggcctcggacgccacagctcagcactgctcctctcccccaagcccttcacttgctggtgtgtaatgagcactgtctcagcgctgggggagccatgaagaggcctgggtcacacagtgtcctcacgctccagcctgctggcagagcaaggccatgggattcaggcctgttctgtccctcagcagcaggacagcgcacgcatctgaggagtgctgatcctggccttgggcagtcagcttccgccagctgtgccctgctatagatggcctgacccttcagggcctgggccccacaacagaatattgtggaagagaaacccaagaacccctgaggccccagcagcctccacagagccccatgagaacctgaaaaagtcctggaaacctgaggtcccctctccctcactactggaaaagaattaagacaacgtgttactccttgggccccaggcagaggccaagctgccctcgaaacatccaatctgctccaagttcagaggcagcctccagcgcatgggaagagggtgaggctgggtcagagccctgcatttaaatccccactctgccacttaagacaattctggaacatctgtgcgcctcagttctctcctctccaaaatgggaatgcccacagtgctaacagcacaggattgccctgagggtcaagtgggataataaatgagaaggactttttttgtgaactgaagccctataaaaataagtgggattatgagtcttattatccctcgcatggttctacatgacttggaaggacatccaagagtttctcatcagaaccttattaaaattcttattaaagtcttattaaaagtttttttattattattaaaatctttgcctggatgcttcaaaatagcccctgtgtgcccaaactaaatatgatgtgaaggaaccagatagctaaagtacaccaacccatactcagaggtgagaggctctgatgggatccaaatactatattcatttctgggagctggcccaatagcatctcggactgagtgacttaagcagccgaaatgtattgcctcggttctgggggccggaagaggacacggtgcttgtcggtggggttggttccttccaaggctgtgagggtgaatctgttctatgcctctgtcctggcttctgggggctgcctgcaatgtggcatttctcgtctcctgccgtatctctggattcatgctcccatggccttctccttgtgtatgtctgtctctatgtcccaattctccctttttattagttagaatggattagggcctttccaaatgactttttcttttcttttttttttttttttttgagacagggtctcgctctgttgcctaggctggaatgcagtggtgcagtctccactcactgcaacctccacctcctgggctcaagcagtcctcccacttcggcctcctgagtaactgggactacaggcacatgccaccatgcccagctaatggctaatttttttgtattttttgtagagacagggtcttaccatgtttcccaggctggtcttgaactcctggactcaagtgatctacccacctcagcctcctaaagtgctgggattacaggcatgaaccactgcacctgcccaaatgacctcattttaacttgattacctctgtaaagacgctatttccaaataaggtcacattcacctgtacaggggttaggacttgaaaatcttttgttgggggacacaatccaatccattaccaataccttcccccaaacctctcaggtgctcagagcctggatccccagctcctgtctgcctcctcacatgttgtctctcatctgtttccagccgagctctgggctggccatggtgaaatgtccaacccaagacttcaagactaacccctttctggccccaggagctgggcctctcctgggcacttgaaggaagagccacagatacaacgtcataggatcaaaacgacaaagtgcacagaccctccactgacagtaacagagagagctggggagtgagaagggcaagcgcagactagaagggtgagacagagacgggatatgccctggaaggaggccctggtgcggggccattgcagaggctatgtctagtgcggtagatgagactctaggtggcacagggacgccgcaggcaggaaggccagagggagaagtaaacagaaacagtcatgtgagaggaagctgggaagctaccaaggcaaacaggagaggtggtggggcatggctcgtggccacaagcccctaagcactgtgcaccagggccagccgagtcagctggcctggcgcagtgatgctgcttgcactgctgggaggtatggccacatctggcccagctctgagctgggcgcttcccacactccctgcttcagcggcaacagggcaggaaagcttcagcaggccgaatggagcagcactgcacacagatgtttgcaagtgctttgtgcaccacccacataagcacagaggacaggcttacagcccaaagttctaatgccggggctgtgcctgactctggcaggccccagatgatggtcttgggtcattgccagtgaaagcactaccctccttcaggagagtatctgtttgagagtcactgacacctactaagatatgaaaagaaggcgcaaacataaaataaaacagttcctgcactcaagccgctcactggacagtgggagaaatagctgagcaaagaggcagtttgaatgaactagaataagagcagagaggagaagatgatggggagaggtgggcctggaggctgataggatgcttgctggagaagacactgaagcagaaatctaagcatcaatccctccaacgggcaactctgtcgcaatccagtggcttcacacatgttgttacttctgcctggaccctccccacccctgcccacctctcctccccattcttcaggccacttcctgagacctgaccattgtcccagccacccacctccacccctgccataattctctccccgaacactgctctttcccatcacgggacatattgcagtctcttagtaaacatctattggtgtttgcttcttaacattacccccagagcatgggaaccaagttcatttcccactgcagcccagcacaatgccaggcacgtgatcatgctcaaaaagcacttattggtacacagtgttcacaggagcaccattcataatgtgtccatcgacggatggatgggtcaaccagatgcggtctaggcacacagtggggcacaactcagccttcaaaaggaagagaatggatggaccttggggacagtatgctaagtgaaataagccagtcacaaaaggacaaatcgtgtaagaatccacttatatgaggtacctagaggagtcagattcacagacagggactagaggaaggagggaatgaggagttattgtttagtttgtacagtttcagtttttcaggttgaaaagagttctggagacagatggtggtgatggctgcacagcaatgtgatatatctaatgccactgaactgtacgttgtaaaatggttaagatggtacattttctgctatgtgttttttatcacaattaaaataatttttaaagggtggaagtgtttaacaaatgagtaaatgaggaagtgaagatgggaggaaggaagaaaggaaacggagggagaaagcaaggtggagggagtagggaaggagagcaggagactgcgggcagaatgaagggagaaaaaccaccaccaccactacttagtaagcaccgacttcatggcaggtgctgcactgaaggcgtcatattgatcatctcactgaatgtaccagcaaagacgcacaggcgggagttcacctaaggtttcaggacccatgaaagaattccagcctcgcctgaccttgcccgttctcaccagagggaagtcgcacccagacgggagtgagggggctggaatctgctacttctcctccagggggactcccatttgcaaagttctccccatgtttttcatctcatttgatcctcccgaggaggaatcagtactcgcagctgacagaggaggaaactgagggcagcagaaagcaagtgtaggcttgttcctgaggctcatgggagtgactgaggcccatgtgagaaatgggagcagctcagcaaaggaagacaccagggaggcgtcattccgtggactgggaggactgtgtgcaggagtgggggtgatagcactcagtgcatgcaggcactgctgggcctcattcccacagtccccctacatccgaaactccccgggatgcttaggaacacaggccctgtcagccaaacacctaggaggctgacaatggtttgtttgtcagccagatgttccaacatcatttaagcatgagcttaaatcccaagccaaaataattccgttaattaaaaaaagaaagaaagaactcatccatatctcagaactcccacagcaggctggtttctatctctaacagggcacttcacctgtcttatactttggtttcttatggtttcttctgcactgctctgtctcccctactagacgacgggtgtcctacgaaaagagagcattttgtttgcctctgtatccccaattcctagcacaagccagggccacagaaagtcctggataaacatttacagaatgaatgtgcattttgctgtgaactcatcatgaacatgacacagagccctattcccctgagggaagacacagctggatggtcccagaaggacccagcacggggagccctcaaggtggggcagctcagggaaaggctggtctgctatggggaaaagctgggactctgggtacccccaggcaatgaggatgcagctttgtgccgcattcctggcactcctagcaccacgcctggtacaggaaatatttgtggagttgagcctgtgccaggtctacattctttctgttctagaccatcaacggaaatcaacactttaccagcatgtcccaaaccaggtgtggtccttgggatgcttctacatgtttagagagaaaaagggctccgttatcagcaaaggtgatttcccacctcttgagggattaaagtgcatagacacatatcagactggcaggggttgagcaccaaatcttctgtttcctagaaggtagcttgggattctttttttcttttgatatggagcctcactctgtcacccaggctggagtgcgatggcgcagtctcggctcactgcaaactccgcctcctgggttcaagcgattctcccacctcagcctccagagtagctgggactacaggcacgtgccaccatgcccggctaatttttgtatttttagtagagatagggtttcgttatgttggccaggctggtctcaaactccagacctcataatccacccgcctcggcctcctaaagtgctgggattacaggcgtgagcaaccacaaccagcctagcttgggattcttaatccctccacatgttcatttctcttctgtaacacagggtgatgatggcatctgtcacacaaggctatgatgagatggcatgaaaatgcatatgaagggcctcatagggtacctaccatgtaggaagcccttcataaatggcagttacactaatgatcataagaaataaatattactgttattagtatatgttgtgactctccaaaaggagcacagattagacagtgttcctcagatttatttgaccacagattttacccacaagtaatcatccatgggactcctgtgttagtccattattgcactgctataaagaaatgtctgaggttgggtaatatataagaaaagaggtttaattggctcatggttctgcaggctgtacaggaagcatggtggcacctgcttctggggaggcctcaggaggcttccaatcatggtggaagtcaaagtaggagcaggtgcatcacactgtaaaagcagaagcaagtggggggcggggaggaaccacacacttttaaacagctgtatctctcaagaactcactcactcatcaccaaggagatgggctaagccattcaagagggattcctcctctaccctgacccaaactcctcccaccaggccctaccccaacagtggggatcacatttcaacatgagatttgggcagggacaaatatccagactgtatcaactccacttaaaagacagaaacctaagtcaatagcagcaaggttatcaggagagctggcctgggaggtcctcatttgcatgaccttgctgctaatgccttgattttcctattttttctatcctgaggttcttaacctgaagttcagagactggctctagggaagtgtatgcaactaaaacttcaggaaaaatcgtgtgttcaagggcacacattcactcaccaactactgggcaccagctatgtgccagacactctactgggtgatgtggacacaaaaggaagcaaagccaggtccctcctgttacggagtctccattctggtgagagagacagatactgaccaaataatcctataagaaatttacaacttcagttgaaattgcgatgaagaggtttacggtgcaatttgaccatatgtaaaggaggcattaactaggtcagagggagcagcaagttcaaggccctttggaaggaggaatggtgagtacaaggagcagcgaggaggccggtggaactggctgggggacctggaggaggcaggagagatggtgcagcccctcagagaccatgccacggagtctgacccatgtgcctttctaggaaggaggtccgtggctttcatgtatactcaaaggtctccatgatcttaatacagttgagaggagctccactgtcaggggcccaagtccctggcttcatttgaagacagtcagaccagccactgggtgccaaggacagcatctgtggtttttgtctgtacaatatttactctctcttttctggcatcaacacttgagtgtttctttaggggaaatcaccacctcccattcttactccttgtgggttctgtggaattaactttaactcctactctagggaagaccatgtgaccctggtctggccaagagaagaagggcatctcctggccatagggatagacccagagatggacacacaaccaagcaggaccagcaagcacctgccccaggacctctgcaggaactactaggagctgctttccttctgcaggttgatatgcctgaagaaggtaagcctggggctgggcgtggtggctcacacctgtaatcctagcactttgggaggccaagatgggcagattgcttgagcccaggagttcgagatcagcctaggaaacatggtgaaaccctgtctctactaaaaatgcaaaaataagcagggcatggtggcgcatgcctgtagtctcagctactagggaggatgcggtgggaggatcacttgagcctgggaggcacaggttgcagtgagctgagatcatgccactgcactccagcctgggtaacgagccagaccctgtctcaaaaaaaataaaaataaaaataaataagataagcctggggcagctggcagtcaccttgagatttcaaagactgaggctacctgtgacagaaggcatcactgaggaaactggcactgagaaatggaaagagacagacccctgatggtaccgtgtgaacctctggacctaggccttcctataatcacaactctccctggattttccaatcacatgagccaataaatgcctgattccagccagtctgaattgtgtttttgacacttgcaaccaacagttttcactgatagatctctccagtcacagtttaaaaaactgagatccagagaggaatcaatcatccaacttcacaaagccagacagcagcacagcacctgggcctgtagactcccaggccagtgctcctgcagcaggctgacggcatgacggatgctcccaatgcctcccatggcctggatccctcccttctcctacctcctcctcccagtccctagggagaagctgtgcccctcttctaacctcaaggccccagaaagaaaaacaaatagggcaggatctttgttccgccctagacccggagatgtctctgggtactaatttccttctgtggccaggacgtgggcagctcagctaaccctcaggccacagctgcaacggttgcccaaaccaacttcacctcctttgctgtactgacagccctctgaggccctgcccatcttacctgaccccattctcccccatgtcccctgttcataccagcctctgtccttctgagtttccgatcctgcccatcgaacaagatccatccacccagtaacttcaggacaccatacaccaaggcttcaggacaccatctcttcttgatgcacacagtcccagctgcctggatcactcctctgggggttgggaggaggactgactcctgccagcgtatccccttcctactgccttgtgtaatttctagttgtttcaatatgttaggtcgagatgcacaactggatgagatgcgcaggtaccatcaaggctaccagtctaggctctggaatcaggcatacctaagtttgaagcctggctctgcctcttcctagaaaagcaaccttgggcaagttacttatccttgctgagtctccatttttttcatctggaaagtagaggtaataataggcatcaaaaggtttaacttagttcttggcacttagtaagcacctggcaaatgttagttattgatgctgctgatgttgaaaatgtcatcagatgccatcaccaatggatgcctggtggctatagccacatgataaaataagagtaaggtcacaacaagaagtcaactatttagttctcattcctgctcctgctcttcactctcctgaaggctttgctttctcatctgtacaatgggtataacagctcttccaggcctctgtcacaaggaaactgagagaatcaaccgagggcataataactaacaacgtcatctccacagagtgttacagtttgcaacacacttccaaggtgccatgttggccttcataagacctgactgtgaagacgtagaggtcaagcgactagcccaaggccacatagctaccaagtgggagaatcaaggcttgcacacccactttgggctgtcctgttcagtgttgtgtccctgaggtccagcacagggccagatgcccggtcaatactcaagttctctttctctacagagccacactgccttccaggctgcagcctgcgaggccaacacttctggggcatccccattgcactcggcacagtgcaggaacacatgatgtgttagaaggaactcctgaattgaacagcactccaagacattcaagagaaagggagggacagaatggcttctaccacctttcacagctgccaagagaggtgtggcctggggaggacacattgtcagtcacctcggcagtgcagggaacaagattgaggagggaacacccaaggctcaggaaggacaagtggccattgctagggaacttttagtaggcagacagctgccctcaagacaggctgtttggttcccacccacagaaagacacggagagttaataagagttacagcagggtgagcgggaagccacaggaagtgaggctaggaggaagttattctcagcctgtgtattccccttaccctctcttgtcccaccacttttcttttggctgcagaagcaggcgaccacatcgtgtaccctcaaccaccaagatgaactcggggagcagggcggggaggacaggcccagaggctgacttcaagtctggtccagttcctacaggcaagtttcaccaaagcaactggagtggaaggcgtgggcaaaagccataccctgcaatcacacgagaaacccaaacacaagcatcctctctaagtcctacgtgttcttcaaaccctcactcagacctcatctgctccgcgaatctgtctcctggccagggcaattcccagagagctttaccctgtctgaatgcagccccgagagcagatcccagttcccactgtagatcctgagttgaacatggcatcaggaggcacccgccagcacctcctgcaaatgccagcgagtctctcctcagcatcccaagtacaccatccgccggcttcactcagtcatttctcagcaacaggaagctcacagtctcaccagaaagtccagcccactggataggagaaactgtgttcagacaacagatgtctggagacacggaggcagccgggggcagtggcaaaaaagtgcatgtgatttggaagcaggaaacctggcttgcaaccccagttctgtgaagcctcaagcaaaatcacttctttaaatttcagtttcctcctttgtaaaataagaagcataatatacctatacttctcagggctgctgagagaattgaatgaaattatgtgtgaaatgtaccgggaagtgtcacgtgctgcacaggtgggtggcattattcaaagactcaagaaggtaaacttgagacccaaagaaatttccagcataggccatttctttggtttaaggcattgaagggccagccaaatgggaaggtaatggtaatcgttttctcttgctggtgaaacaaatttccacaaacttagctacttaacacaacacaagtttattatctcaccgttctgtagctcagaagtccaggttgactcagggggttttttgcttagagtcttatcaggctgagctcttattggaagattctcggaaaaatctgcttcttcatgaatggtggctgtggcagaatcaaattccttgcagttgtaggactgaggtttcctggctagctgcccgcaagggatgccctctgctcctcaggcctctccggtctctgtgcctgggcccaaacatctcagagccagggagggtacaacgcatcataaccttctgattttcccttctggtgcccccgctcttctggctccagccagagaaagttatcattttttaaaggcccacgtgattagatagggaccgctagataatccaggataatctccatcttttaaaattgttacaggttgaactctaactctccaaagaggtggactggagtcctcatcccaataactcgaaatgtgaccttaattttaaaaagggtcttacatgggctggggacggtggctcacgcctgtaatcccaacactttgggaggccaaggtgggtggattacttgaggccaggagttcaagaccagcctgaccaacatggtgaaatcccatctctactaaaaatagaaaaaattagctgcatgtggtggcacatgcctctagtcccatctactcgggaggctgaggcacaagaatcacttgaacccaggaggcagaggttgcagtgacccaagattgtgccattgtactccagcctggatgacagagcaagactctgtctcaaaaaaaaaaaaaaaaaaaaaaaaaacacaaaaaagcatctactaatttgggggcataaattaattaaataaaataaaaaatgaaaaggctcttatagaggtcatagagttaaaatgaggtcatcagggcatgtcctgatccaatatgactgatatccttgtaaaaaggggaaatttggacagaggcacagagggaaggtgacgggaagatacacagtggggacacagccatggaaccaaagcgaggcatctacaagccaaggcacaccagaagccagaaaagaccaggaaggattttcccccagagccaacagggagagcgaggccttcctgatagagtgatttcagacatccaccctccaaaaccatgagacaatacatttctgtgggtgttaagccacccagtttttgatgctgtgttacagcactcctgggacactaatacaaatatttattttaaaatttttttaatttttatttatttgtttgttttatagagacagggtcttgctctatcacccaggctggagtacagtggcacaatcacagctcactgcagccgtgaactcttgggctcaagtgatgctcctgcctcagcctcccaagtagctgggactacagccatgtgccaccatgcctggttaatttttttaaaaaattttatagagatggaggtctcactgtgttgcccaggctggtcttgaactcctggcctcaagtgatcctcccacctcagcctcccaaagtgctgggagtacaggcgagagccaccgtgaccagcccaaagattttaattatatctgcaaagtcctttttgttgtgtgaaataacattcacaggttcacaggatctctggggaaacattcttctgtcacccaaactcacccagtgactatcagtccccgatgctttggcattctcagacccattgaacagaggaaagagccatcaactgggaatctgagagaggaggaggcccaggaagggaccaggaaaatggccaagttgcaaaaacagctgaactgatgccacattgttttaaatagcaggcacagtgctggcagggaagagtgtgcacagtgcagccacggcgcctgggtcaaactctgcttctacctctttgcaccttactgagtctcacatccctctcccttgaaagcagattataaatgtatacaatatctaacttcacagagatgcaagaattaaatgaggtcatgaaaacatggaatacctggcacttacttactagagagcctggcatatagtaagcattcaagaaaacctagtcattataattgcatatctattatacagatgtttaattatgtacgtataaaacattgtacacacacacacaagtctgggagaatacacagcacaatgttaacagtgcttacttggggcagatggcaaaggctttcaatttttactttacatacctctagaatattttaattttataacaagcatgcattgcttttataattaaaactattcttaattaagaacacacggctccctaggaaactagttgaacatgtccttccacatggttgtgttatatatagtactaaaacacaaatttgctaacacacacacacacacacacacacacacacactgtaatgttcacctaaagaccttctcagtctccctagccttaacccccagccccggcccctcagcccccacagctgtaccccgagatgaaactcaatcctctgcggcttgcctcttttgtggagccagttgtagcagcgactccagcccttcccggttctcagcttgcaagctcctcgcctcctcttggagctgcattctgaaaggctctttgttgctaggcagaatgctttcgggggccctttgaaaaaaatactccctgcagacatttccatctgctctcaggagtcccctctgtaaaggggcttaaggaagcaaagggcaccaagccaggtgtctctgcattgcccacaccctcgacttcctcccatttcaatcaattaattaatattgggcaaggtgaagccagaggccatggcaaggaaggagcatggtgctgcccggcacagtcatgacctttaacaaaacctgcttcagtgagttagaatgattttgtttcacagcacagcaaggggattagacatagagactttgcatcagactgaatttgaatctgaactgccacagctactagctgtgggaccttcaacaccaggtgttaaggtcttttgagcgtcagtttcttcatctgtcaaacagggataagtagacctcaaggttttaaaacagggataagtagacctcaaggttttaacaggaggatggaatcaaccatccacgtaatctcttagcatccaaaggaaatgctcagtaaatgggtgttgttaatgtcattattattattagaaatgcagacacagatcctgccttcaaggtatttatagcctagaatgggaattaggcagagccactcggaagttccatgaggacatggccacagtgtaaaaggcattcggaggctaagggtcaaacaaatggtaaagaacgaactaggtgctttacaggagagatgagaagagggaggttatccagtccagcctggctccttatccttgcacccctcctcccaagagcctccctcccccagctccagaaccatccctttcaggtataaatcagctcagaaggtataaatcagcttggaccccaccctgtggcttccacaatgtaaacctcagtgcaacagcaaggatcccaccttgttcccaagccctgggctggctgttgtattggtcatctccctagtataccttgttcttcccatcctccctccccagactagttcaagaccagcctggccaacatggtgaaaccccatctctaaaactataaaaaattagggtcttcccacattattagagtcttcggtcttcccacatgattcccaagggtcataggccctagagtccccttggcagtattccatccactgactggggcatttgtggtttcacaatcactactgacctctttgcctgcctggattccaacctcccatggacaggctgcatgcccttggacaccatgcaaggcctcttccacactgagcctctctatcccttacctacctggcgaggccagattccagcccctcacactagctaccctgagcaccaagacggggcagggaggatcatgactggagtggtcaaagaggggtttcagaggaagaaggagccatctgtgaactgggctgactgtggaagggaggcatatcaatggcacccctttgttggggtgggggggcactgcactggataaatgttgagaagtcgtttttttctttccttccttatttctttttttttttagagacaaggtctcactctgtcacccaggctggagtgcagtggcaagattatagcacatggcagcctcaatctcccagactcaatcaatcctccttcttcagctccctaagtagctgggactataggcgtgtgtcactcaagtagcactaaggcctgactaattttttttttgagacagggtcttactatgttgctcaggctggtctcaaactcctgggcgtaagtgatcctcccacctcggcttcccaaagtgctgtgattacaggcatgagccactgcacctgattgagatgtcttgatgtacgagattagaggaaagaaagattagaaacagactgtaatgagctttggatgccaagattgattgttccccaaatgctcccaggaggattcagttgagcggccaggagtgggcaggcacacagggttagcaaggataacctagctaagtgttgggaaagttccactttccaaccaaacccagcaactcagcattctccaaccgtgtcaccccttcaaacccacaaactgttataaatacttgctaaagccctttttgctcatggtacatcacactagttatgctagcttaaagagcaccacattgtctcaaaccttgtcgcctttgaacctggagtcttgtgggcctggaaggcttttctctgcccttctgccttcaagatctaacttaacctccagggaagccttgtccttctctcccaaagagaatctgacgttctatgttctcatagtaccctgagtgtctctctattacaatatttatcacactgtcttgtgactacttcctgagtaatataaatctttctttattgttacattgtcggctccttaagaataggggttctgtattatttattctataacagcacctgggacgctcaataaatgcttgctggtagtattatcaatatcatctcttatgaaatacctaccacatgctaaggactaccataagtacttgagaaacagaaacttgtttaatcctcatgtaattcaccagtgaagtattacttcgcccatcttgtagatagggaacctgaccttcagagaacctcagctaaccgtgagatgaaggaatgaaccagcttgagcaggtcaactcccgccctccccaaaccctgccatgtacgactgaccccaggaataatcatgctgtgtccttaggcggtctaaggtggatgtttatttccagttattgaaatctactcaatttgagtccaccaatcaataagctgctcttgaataaacatcgggggcatctgctattctacagaggaacagcttgtcatttcagcagcaccaaagcaaggttaattagccctttctatagccagtgggcactgaagtctccccacgttcttacttttccttcagcaaaaagttttttgtttttaaaattttttttattatactttaaattctgggacacatgtgcagaacatgcaggtttgttacataggtatacacgtgccatgatgcgttgctgcacccgtcaacccgtcatctacattaggtatttctcctaatgctatccctcccccagccccccaccccccgacaggccctggtgtgtgatgttcccctccctgtgtccatgtgttctcatcgttcaactccctcttatgagtgagaacatgcggtgtttggttttctgttcttgtgttagtttgtccctcagcaaaaagttttaatggcgatctttctaaaaggcaatgtgcctccaaggtgaaaagttgcagagagggggtacagtcagtggactaactgaggaaggggcagagtggtatttcatcactgctgtccagtgattgagggcaagtcggggagaactgtaccagcccacgcccagacgctgtgctgagtgctccacatcctttctctctccacacagcacctttcacctcttcaaggaagcacagtcttcaccaacctcctaatcacaaatcgagcagtcttacccagccctgggcctcttcccccgggaagaatagcttaagaagtcagccactgtctcttactggctgcccctttgtgcacaccaccagcccccttggcttatataaatctagaccctgccacagcttcatctgtgttgcttcttgctgacagggcatgctctgcctctctctcctgccctgcctcctttttccctcacaacctcttcaatccaccagggtcttaccctcaggctcgatctcatttcaccgaacgctcgctcactggatgtcccatgcaaggccgtgtacgacgtgacttatacccgtcagagacgccctcagaacacctgcaatccttcatattcacccttgacagtgactacagaaacagaaaccaggttcacaacaaatcccccaaactcatttagcaaacaaccctctgccagaagcctatgggaacaatagatttggaatgggactctggtcctagaccctttctgtgcccatcccaaattagaaggaagtaggatgagggggtgaggggagaaagaatacaagacagtgatcacaaaaagcaaggatctagctgtacccttaccaaacgtgcatttttctatgtgtacattatacttcaataacacagatttttgtaagaacccaaataaaacaaaaggctgacaactgaaaaatccatgaccaaaattaatagcacggataattgaagcaggagagagatacagaaatattagttcacctttctgttcctaataatacccaagggaagactgagcaaggagaaccttatggattagaagcaggtaattagtgtgtccatttgttatgttacacaattataggtcttcaaaacaactttggcagagagttgtagacctagagagaagggcatgaaagataatctaatccaccttttcattttctagatgaggaaactgaggctgagtgaggaagagtcctgtctccacccagcaatcatctgccacatatgccttctccaccttcttatccactgacagaatggacacgaagaaagatgaatggggccacaccagggctaggagagctcagatggactttctgatatttcttgtgctggagaaagctcagagcaacctgacatggccagttgtgcaaagcatattgcctctctttggtgccatatctttttccctttgatgtgtgatcacttcattccctccttgattgcttttcaaaagcaatctaaattaatgcgaacccacaaagggcaaggctctctgtgaataattagtgcatgataataaatgcaaatagggaaagatgcaaagttggcctaagaactactgctccctgctcccctgcccattctctccacattgggaattctctttacattattaaagaaagaatttgagtaaacttgagaaagggtggtattcctaagcagagcactggattcattgaaggatggtagaaagaaagaacagaagctaaaagaatcagaccagtgactgctacagggtctttgtcctttttttgtaggttccactgaagacaaaacacttgtctagatttctgccattcagaggaggacatatcatcacagtcaagaaggagccaccataatttggtcctgtccactcaggattttatcctacaaaccctgagctccagtcaatcttgtctcctttctgctccttggctaaatcaaattaaaaacaaatccaaagccggggatgagatgtgttcagaccttccgtaaaactgtcttgaatattatgcagagagaactggacaaactgaaggttaggaaatgtttcagctggtaaggcaagcccctgcttattctccatcaaatcgtttgtcccgagtcccttctggaagtcagtttttatctattgtcatatttaatgggcagagctgtatgggaaggggatgaagtatctgtggagcctgaaaattggactcctccaatccctttattcaagatcatagattattagatcaatacaagatttgggcagggacacacatccaaactgtatcatctcccatgcaccccatattccctacacttcctgtaatccagggacagaaaacagatttcagctcaagtgccttctaatccatttacaatggctgccaggagggctatattcagaatagtctgagagcatgtctgggatcagtaggaaatgggtgagaaaatccagaagtttcatgtccttcacatctctgtcattcctgattgagtccacccctgtcattttcactgtggccaaattaaggccttaaaggaagaactgacacccagcatcacagagtaaattgataaaaagaacccagctctccctgaatctcttattttcctataatccagagtttaagacaggagatggatctaagagtacagtcataatactataaccatttctaaatgcttactatgtgccaagtactatcctaagtgcttttcatgtatattcgcatttaatcctgccagaacactgagaaataatcatccccgcttaacgggtgaaattgacacacaagagtggtcaagtaacccatccaatatcccaggaccagtaagtgacaaagtagggattgacacacggcaagaatagaacagaactgggtctagaaacatcctcacacaatcggtggaagattctggtaattacaccaacacatacaaagtcaattcgcattggaaaaataccccatgaaggcccagtgatcttttcagccctggtgatgtcaaaggctgcagaataaggagtggaaagtcctagttaccatgacaggaagcaccagtgagtgatttagaaggcaggagatgagaacaggcaattcagcaggactcaggtaggacgctgagctcttggcatgaacagataggtttcgccatggtctcgagtatgacaggttggtcccaaaaggtccagttttgctcaaaagattccctgaaactgaaaatgtagtataacggaatatcactggctggctccaatcctcggggcttgctgtttcagaagagaaagaggcgcccatcgatgtatttataggcttaaagctggcatgcactgaagctacctggggttactcaacaactgttttagggcacatttcctccatctttttgtttcattaggttttagtcggtcagctatctggggcctgaattaggatttcacacacatccagagccaaatgacaaaacaaacaaaagaagccctgtgactaaaacagaacttggggtcagcagctcagtaagggtggccccctggaaacaactcctgtgtaggatcaaaggaaagtcaagtggtatgtcacatcccagggctggggacccttaggggaggggagccccactgccttgagctcagccagtcacccctttgttccacgaccttggcctgcaaagttcttccctcccatccctgagcaaaatcctaaagttccttcaagttctggcccaagtgtcgacttctttgggaagtcttcccttactccatccctaccccacctcttcttcctacagaaaaaaaaagaagtttctcgtccccctcctccacactctgtcctcagttcccagcccatcccacaagtctctggagactgggagagcataggtgtggagtcgccctcattcaccactttagagagactggaacaacatcagcagccctgtggaggcaagcccaggcccaggcactatggtctcccggattataatgattcacacacggaaaacattggagagaaaaagctgaaaaggaatatgctgcccaaatttctctaccatgagcaagtattgcttttatcattggaaaaacataaaataaacattttaatggactgcacatttctcacgctaaaggagctaatggtgtttcctattgtgtggaaaacagacctgaacccatccacaggatgctgaagaatccacaaattacggcacgcattgacagtgcctatgtacatgggaaggaggaaactcagcctgcctggggcatcagggaaggctccacacaggacaggatgagtgagagctctccagttagactagggaagatgaggcagaagggaattcaaggcagaaggaacagtatggtcaaaggcagagtcatgaatgtgcaagctaaataatatggctggaatgtgggagatatgggagatgatatcatttggatgggtgtccccgttcaaatctcacattgaacgataatccacagtgttggaggtgagccctggtaagaggtgactggatcatgggggcagatttctcatgaatgattagcaccatcccccttggtactgttttcaccacagtgagttcttgtgagttctggttatttaaaagtgtgtagcatctcccccctcactttctctcactcctgtttttgccatgtgatatgcctactcccctttcaggttccaccatgatcgtaagtttcctgaggcctccccagaagatgttggcacctcatttcctgtaaagcctgcagaaccatgagcgaattaaatctcttttctttataaatcacccagtctcaggtattcctttatagcaatgcaagaatggcctaatactggagagaatcgtggatgtgaggtatgcaataaaaggttaactccactagcttggggtcctcaaactctgcaccttccaaagaaagaactggcccttgaccagcccccgggaaataacctctgagcccttggaatatcgtgcctgatggaatagagtatctttgtatcgctggggctttgggccaccccacatagtttatgctaacagtgtaattcatgataaaggcctgtttttgtttacctggagtcccagcccatgctgtatcggtttgattccaggcatgcaggggttgcatagagactgagtagccaaggtcagtcacgtgggtgactcatacctccgtgactgactcccttctcctaacaaaaaccctggacaccaaggggcagttgggtttccctgctatgttttgtcacacatcattgctgggagagttcagtgctatccaagtgactcccccgggagaggacaactggaaatttatgcctggtgtcttcctggactccgacctatgcacctttttccttggatgattttaacctgtctccttttgctgcaatgaaccataaccatgagtatatcagcttttctaatttttgtgagtccctcaagtgaattatcaaacctaaggtagttttgggacccccatcacagagagtcaaacaggggcagggcaagaagagctgcttttcctggaaggctaatgagtctgaacttcgccctggaggtaatcgttatagtaactccaggctctaacctggagctgacatgataaggtcaaatgtacacctctagaagacttccgactgcagaggggaatggatgggggagctgagggaggagagctgaagcaggaagaccatggcctggaaagagatggctgaaccagtccaggtaagagctggtgggcccttggtagtgggcagtggccacggcaaaggactaaactcaagagacagaaaatagatacaacaagacttgccagccaattagactgtggggtgagggagacaagtcaaggacgactcccagatttctggcctgggcaattggagggatgatgaagtcagtcactgaagtgagaaatcctgagtggggaagctgatgttcaggggcttgagggaggttctgacccccaagcccagcctggtactttcactgtgttcatttctacaattcaggaaccatccgattgctcttttttctctccttgaagccatccccttagccctctgcccacagtgatcactaactgattgctcctccttaaaagccaccgaaaagtgtgcttggctgatctccctgacctcaatttctctgctggcagaatcacaagaaaggcatcagcaccttctgtgaaatggggagccatgcagaggaggtgcccaggtgggtggcaggggcctaaataaaccacagctatgcgaggaggtttcaaacaccaagtgctggcgggagatggggatcctgggccagaccctggggaggtgggactaagatccctgtgacactgggttggagttgggggcagggttgaaggaaatcatgagaaacaaaggctctgggggctgcacagaacgtctccccttggcctggggctaagctgcactttatgcatttccaggtggcgaggagtccatgtcagctgccgtcatccacaccacagatcagacatggcaaagagtggccaggccttctgagtgaaggtgatccaacctgtcaccaagcctaagggcaaatcctggctgtgctgtgatggctccaacaaccccaaacagcagcgcagaggctgcagccgccctcggaggcaacactgggaaacgctcattagcagccttccattgctcacccgccccatcccacctctgtgcatcccagatcatcagcgaagtgcacagctggcttccatcctcggagccttcctccttcatttgcctattcaacagttacaaaggcctgagttgcaaaggggcttacaacccattccacccagaagaaagagaactgagactgagcaagacagagaataggtggaaggggagatgaaaccaagcaatctctagatcccaaatggggaccctgatgtagcaagagcctcttttaaatccttttccaatagggtaatatggaaaatagttgaaagcacaagccaagtggggctggaatcccaaatgggccatttactagctgtgtgactggacaagtaatttcatatttctgggcctcgatttttctcatctgtaaaatagaaaaaaaaaaacctatgtcataacgttgataaacagattagatgagctaagatctaaaatgtcttctattcagtaggtgctcaataaatgttatctatttttacgattgagtctctaagtctggagattaaggaggaaagtttcacatgctgggttctgcaggtaatacagtgagacatggtttctgtactcatgctcctaacttaggtggcaacagctgagaggatagtctgaggctgtgcagggctgaaagcctcctgagaggtcatctgatcccctattttcatgggtgagaaaacagagatgtaaaacaaccttctcccaaagtcaacagcaagatagtgccaaagtcaacactagaacccagggctccaggcttctattgttctttcccctccaataaaaacctaatgacaggatgccacaagtcaggacgtgaataaaatttcaaataacttgccatagagaacactgtgccctgtccagatccctgttcccaggccatgtaccatcccttggctgctttgggtggtggctaccagtggctcacagctgccctgtcctctggagaattgccacccccaccgtccccacacccagctgatgagggagattatacccagtgctgtgttggcaaatgtttagcagccactttctggtggggtaggaggagccctggcttgagtatttgccactttccctggtgtaaatattcccaccatggccgactccaagctcccagcaagacatcaccgaaggtggagttgtggagagatgcacatagctctccatcacatagtgtttccaccataaagatccaataaccaaaaataactgcaagtgcacagatttttaaaactgtagtaaaataattaggaagtgatgacttttgaatatgtatttccattgtttcagcattatttacttaattataactttacatgatttaattgttaatagtggctcacaacgttcctaaaaacgtgaccaccacaagctcgtaagggtcaggtccaacacaacactggtttacccccactcccaccctgccagcctgaggccagtgactgatgacatgaggatacaaaaagctggctgttcatctcatctaggggtgaggaacaacttgtggtgtgattaatagcagagctcccatggatcaggcccagactaggattacctgaagccacttcctccctcagctcctccccctccccatccttctgttgccacctccttacaggtatttccagaaaggcacaccaataaacagcatgcacccaaggccccgtctcaggctctatttctaaaaaactcaacctaagccatgcacactggctcacacctgtaatctcagcacgttggaaggtcaaggtgggaggatcacttgagcccaggagttcaagaccagcccaagcaacacagcaagacgccatctctacaaaaaataaaaaaattagccaggagtgctggtgtgcgcctgcagtcctcgctaatcatgaggctgaggcaggaggatcacttgagcccaagagtttgaggctacagtgagccatgatcacaccattgcactccaacctgggtgatagagcaagaccctgtctccaaaaaaaacaacaaaaaagaaaagaacccaatcgaaaatacttgtacagagtgaaaatttagggagaaaatttagaaaagatcattgtggctttggaggaatcccaggaagctttctgcaggaggtgggatccaaagagtgggtaggattttgatttggaaatgaaagccaggaaccctccagacggagagagcagtttaatccaggtgaaaccaacaaccatgcatttgacaagtccgtctgcccagcggggcggggttttcctagagacaagccatgagccctggggaccacccattaaggactgccaaagttggaggagggggcgtttccatggctacggtgtgattaagaaagatgtgtggctctctggcaagggcagtatggtgtgctagtttgcactagaaacatcatctgtaccaaaacctttggagccagaaggtcgtctttggatcatttactgccactgatggatgaaagctttcagttgtaaaagagtaaatacagtatatttgttttaatagttgtgttttatgttttctttgctcttatttttgctttttctttgtttttaattttttaattgagacaaaatatacataacaaaaaatgtgccctctgaaccagcctatcttttgtcttagagttacctccaatatacagcatcaatgctgactttttatttgcagaagtttgtaacatttccctccaaaacaatttgtacagaatagatggatcagtttcaagaaaaatatgcagaaaataataaaggtgacataaacatggaaaaatgcaaagataagagacaaaaaccctaaattttgcaaactagtccaatactcttattttaagatagcaaagttgcacccagataaagtaagggaacagccaaaggtcaggcagccagttaggtgcagaaacaggattaaaacccaggtcttctaattcccgtttctacattttccactctggcatgatttccattttaaagaaggaagaaaaacaacatattcttttctaaaacacacctctccaaagttttcgtcctccccattcaaagatgcacaacagagaacataccaggttctttttcactcacgacaagaaaagccaccttcccttttaaatcagcctcaacgatggttttcagggtagaaaagggattcgtatagatgacagggtgtactggcctaaagaggacacaaatcctctagaaatctgtcacccctgaattcatcattctgctaacatcagatgtcaatgctagaaaggaaagaaaagttggcattttcatgccagcctctgcctctagctgttccacaggacatgcctgtcaaagaggtggcccgttttccaaactaaaatctacaagcaaagttggtttaaaagtcatcctgctgagaactgtgaattgggagattggctctgccatgaaatggctgtggatctccagcctcctttcttaatcgctccaggtctcggtttacccactttcaaacagagataatagttcctgtttatttcaatatcagttaaataatcactaaacgcttgacaacttcacagtttgcaaaatgtttcttctcattttgtagtgtctcatttaaaccacacaactgtgtcatatgggtattattatttaacagattgggtgacagactccagaagaccatgtaacttgtctatagttgtgagtggctctgaaacccagatcctgtgatcccagatcatgcatctcagaagtttagaagtacatcaccggcattttccaaagcatatgcttcagaatccctgttctctaactacattgttattagttattactttctaaaagaggtgtcataatcaaataacattgtgttaaaagtttaaagggcttccttcacagccatgggactttaatatgaattgtgtatctccaagagggaatagaatatgagcctttccaaaacttatttgtcaaattacccaatttaggtagaatctctttcttaaaaataatattccagagaatatttgggaaatacaaaaactatcctattgtagttattcttcattatattatgacttgcaggtaggttgtctgttgctttatagaaactagtaaactgtgttatcatacagggcacaggcctttctatagagactgtctttcaagtctgtaacaattagactggtcacagcctatttgctccaaggaacactggatgacaaggctttctgtcattacatctgatttatgttcagatgtttccaaaaaagttgaacattctttatatgtctacatggccttagctacatgtctcgggcaaccagtatttatttaatgtttgtcgtgccttttatctgtgttttattatttctctacataggcccactgagtcaaggaagacatcttcttcttcagaggctgttcaattcccacatgcagtgatgaggaagactggggtaataaggaaggaataactccctctccttatacaaggttctgggaagaaaccacggggccagcttcctggacttacaatctacctagcattcagtagccagtgcttggtttggtgctgtgccagtactgtcttgaaactcttaatttttgaaaaggggctttaccttttcatttgtacagggccctccaaattaggtatccagtcctgagcaaccactgtttaattgtaagctccatgaaggcaaagaccatgtctgtctactcccagcacctggcattgtgtctagcacaggatgaatacgtcaataggtgcaaggaagaggttgcagggcccagaggccttgtcctttctctccccagcaaacggggctaggactgtcctttcttctaaagggcattcacatgtaaaacaggcccaggcaccaaacaagaatgaaaactcatacacaaactggaggaatcggccagcacagaaaattaaaaccccagcctgtagaaagacaagcaagaaaagacgggcagcaagcagacacactgtcctctctctccagataatgggacattttccagcacttctcgcagcgacagccaatttcagaacagaatcctgacctgaatgtggcgcattttccttcctgtccccatccaatatctgcccccccttcccatcctttttaagccagctatctccaatccccagcacctctcagctgctaaaagcctgaaaggtttaatctccaagaaggatgctcaagggctccgttatcagagttacttaattctgcatttgcaatgggcttaatcatctgcatcagagcacactcccgcgactcactcacacgcgctacctctctgctccagctgaaagttcttctcacttcatcagcacctcagaagcattcataaatgcaaatgtgtaccggcagaagtcagggtggagggttcggttttgttttcccgtttttcaatcacaccaatgtgctagcaacgctgactgagatttttttttaagccatggcattttacctcccaccaccaatcaaatggtttccaatgtcctttgtttttttctttgttcactttatatgactgctgtgacaatactttccatgtggctctatcacctccagaggcctcatttctaatggctgtataatattccatcaaagagttgtaacattattaaataggttctgcttttgtttgttttttattataaatagtgctacaatgatcattttcgagagcatgggatttaaagaactgcattcagtttttggctgtgtctcttcctagttattgagtccctaaaggggaagcaatcgtattctctaactcaaagcatggctgatgggaaagtgctttataaactatatgagcactctacaattattcattctttctcgacataccaagccccatccaaaaagatttacaaacacatggtctctgtcccctggaaatgtgccattgagacagacaccattgagctcttaaataaaggaacaatgacaaaaaagaaatgaaaaaccagtataaatgcttaagaaaaaaatcaagccttcagaaaggccttatgaattgcaagtcacactgtcaggccgtaggttggctagtaaccaggaaaatggcatttaaatgcaagttgattaaaggagaggctgacaatatggtggctgtatgcaaggcatcgcctgtgtgcttggaggggagcatagctacagccaagaaggtaaactgtgtcccatgaggactcataccatgagctgtaaaaagaaaaagtatgtgtcctttatatgtcaccaatatactttgtttttaagataaataagctatattatcaaaactaaaattgtttcatttgtataaactttagaaagaacctatatacagtaagaatatgttattaatatttagggggttggacaaggattctttcattcactcaatatgtatttgttggtgcctatgacatgctattttgctatattctagcacaaatagaaagatgaaaaagacaagctcccagccaaaaaggaacacacaaaagaccatagtaaatgtgagtagtgccatcctacaaaagcacctgcaaaatgttatggaagcaataaggagaaagcaagtaattctgcccccaaaaaggcgtgggctgaaaaggtctcacagctgaagccagttttgacctgggtcttactggatgagtagtttcccaggcaaagaaggaagaccatgaaggagtgtgtgcctccctgggatagaaagcagaagaaatttccagatcccaaaaagacagggttccaggcagaattgttctgcgcagtccaaagaccacgtacatcaatattacctggggtgcttgcttcaaatgcagattcccgggctccaccatagacgtattgaatcccgtggtggggcccagcaatctacagcttactaaggtccttaggccaggctgacacacactctcatttaaaaaccagcagtaccagtaacagaatggcactttccaaacaaaactcaagtcatgactacccagagatgatcagctgccagtggtttggaaatgcaccgagggaggccctggagcagaggagggtcagcatgttggcacctccctcaagccaattccagaggcctccctctgctcttgacaatcagccaatcctggtccagatggatatattccccattcaggcacacaccattttgttggcttaatattggttttctaataggaaggctcggtgacaacagaccagacatgaaggacggtgacggaagccaaccatgccccacacttgccctctcaaccaccacctttaacccacaaatcaggctggcacccccagcccccaagacctcaggtgaggaaaagggactgtaagctcctccgacatccactggccactgacccagtgttgaagcccaggtgatagaaaagcctggaagccaaggcagatgttcagccaaattaagtggttccaggagaaaatgaaaacttgcctgctgagacatctggtgtccattaacctcctaagcagaactgcagcagagccatctgctggaacagactctccagaggcaaggagcgtccccgccctgtgtgcctctgcctgctcccagcaaaggcttggccttgacaagagaggaaaagaccagtccacttgccttcaggaccctataaccggttccttcctaactagggagtcagcaggaagaacagtcaagagacgccttatgaggctccaatcaccaatgacttggcgtttgtcatcagggagagtacactgacatcaaggagagcttattctgtatcaagtgcatgtaacactcaaggagacacgttacagagacttgagtgctactggagggatgtaattcttaagttgcctaactgataaataaagagaaaggaaagacaccaacatttcatgaagacctactatgggccaggcaatgtgctgtgcattttcagatccatgtatctcattgaatccttacaacaactctgtgcgttgggtgttactatttgcattttacgaatggcaaggataggcttcaaactcaggcctttcaacttccagaaaaaagtcgaatgcttcttttgctagaggactgtgccacagtgaagccggtttctttggtttggaggatggggggaagggaggcgggggaagggttataacaaaagctatttgtggggctataacaaaagattatgcatggatggggtttgctgcctttgatgcttttgaagatgaccagactaagtcttgaaatgtatccatagaaacagctatggcgggagcagcagccaaattagctcgcccttgaggcagttggactggggactctggagactcttccttgatgaaggaagagtggtattagtgcccacgttatctgccagccttggcctcttctgtccccatagctggaccagctgaaagctcagccccctcccaagacacagcctatccagacaccaagctttccatgaagctaagccttcgtcaccctctaagccccaactccagggagctgaaaaccctcctggggcagctcctgcacaggataccactctgatgttcactagcctgccctgctccagcaaagacctgcactctaaagtgaactcttgtctggagcagaggtttccctgccaaggcacagacctccacatggaaactgcctgcctgccccaccctcgagccccctcctggattcctgccccatctctgctcaccccctggaaaccctctgtccactctgtgggaacccctgagctgatgctgggcctgaatctcccgcaggcctgggactctgtgcctcgcagctgaggcttctagtgttgtccctgctggagtccatgccccatgccaggagggcaagaccatttccccagctgcccacagtggctgacagctcccagcggagcccctctccagaacatgctctaggctgaagtaagcctccttcctttccttttgtgggaaaaccaactgcagtgactggttgatgggagggcataaaattcagccacttctccccaagccaggccaactccaaaagtcaccctagcttcagcaacccttgtgggatcagctgaggctttccagcccagttcatcttctcctctgccctcctccatagacaccgatcctgagagtaatcctcagggaacttattgcacagaagtctctgactcccagtctgtttctcgggaatcgggtctcataaagacatttttgtcctcttcaaactggagggcaccatatcccatgcccccaccagctatgtccctgcagctgcagcttgtcactatgaccaaaacaatcaccccctctcccaagctcaggagaatcaccctgagccttgaacttggattctagtgctaactctgccacttaggtgctgggcaccctgggaaaccacttaacctctctgaatcaatttcctatctatacattgataactaaacactgggacagttatcctgagagttcacagacatttacaactatcttgttcatttatcaaatattaactgagaaccgaccacatgtttgtttccatccctcagaccctagcctagatgtcacttcctccaggaagccctctacagccctcaaaggagagatcgagaactcttctgtgctcctgcaccctctgcccacacccttactgcagctgctaccctctaaattgcaattgtctgctttttgtctttcccttatattggcccctgagctataaggggatggaatgtgtttattcaatattgtatgcccctgtgcccacctcagagcctggaacatggtaaaggttcaaaactatttgggaactaattaagtaataaagctaggtgctacagaaaaagcaaaggtaatactgtgttcacatagccctttacaacgtgcaaatggctttcatacccgggatttcatttgatcctcataacaaccttgtagagtaggcagggcaggaaccattttccctgccctaagtggttcactcactgatggggcctggtctctggcctgctaaggcagcatctctggcccattcccccacgccccaccaaaacatgagaggaggatgtagatattaccgctacagtttgacaccctaggaagcacttgtctccaccaccaccacccctagccctgtggcttccattattcagggaccaacacctcagcagtgaatgaatgaaaccatcaaacaccgggaacccatcttggaaactacttagaccccaagttagaatacttcttgtgacaaaattccaagggagtagggccctgtgtgaccctcagaaaagctggagaaggcagagggcctgccagaaaggccacagaagtgacagcctcagggcctggacacacagccctggacagagccttagccaggaagcagtggcgttgacagagcatgaagagagttcggaggtcaccaggccactccccaggcctccctgactgccaccccgctcactcctgggcctgggctagacatgcctttgcccccacggccttgggctctgaactgatctctgtttctgtgacaaacactggctgtctcagctccctgcagatcttatccgttgggagataaaatggaggagggagggtgtgtacacaacagctttctcctagctgcaaaacagaaattcttttctcctctgccccagagggggaaaacattctacacccaaacgaggtaccaactctccctaaggtcttttttttttttaagtcctaagtgaatgcatgatttttccctaaagaaactgtggtaatacaattagcgatacacagaaggcgtaagccgggcaatcacaggccctccctacccccagccccagccttcgtaggagttaggctttgaaatgaagaaatctattgtcgctggggagcacggagctaaatcacaaatcccagcagagcggtgacgctgaaaaccgccctttgtggaggcagccaagaactgcacgttaaaggctggacgttactggcagcaatgcccaggcctattctactcttggcttgtttaagcttccatgggccataaacattgatcaccatttagactacagcaccttggtgatgtaaatcacttgtcagcctggagctctgggagagacaatctcccttcggatcccagacccaggaaggggcacccagaaagttgctgattatgattcgaaaatgcgcagtgaacactacaccagcgctgtccaatcaaaacacaaagtcacaagtgtaattttaaatttcctagtagccacactaaaaaattaaaaaggggtaaaattaatgttaagatatattttctttaatacaatatgtccaaaatagtattactttaacgtgtaatcaatataaaaaattattaacaagatattttctattctttttatttgtattaagttctcagaatccatcgtggattttgcccttgcagcacgtctcacacgggactaaccacatttcaaatgctcaatagccacatgtggcttggtggctaccatgttggatggtacaactatcacgtttacagaatatatctaattggtctttaaaacaagcctcctgaagtaagcatttgcatcaccacacagaggacagagctgagactcaataaatgagtcagccccacccaaatctagaacctacatctcctgcctcctggtcctatgtgcctatcatttccctgtgctcaagcaaaccaggataaaaactatggcaaaagtaagtccagtgcttacagaatgcaggtgcattattcaacagatagccaagagatggaagcaacccaaatgcccatcatagataaacagataaacaaatgtggtctagccatacaataggatattattcaaccttaaaaagaaaggaaattctgacacattctataacgtggatgaacctcgaggacattatgcaagtgaaataaaccagtcacgaaaggtcaaacagtgtatgattctactcatacggggtacctagagtagtcagattcacaaagacagaagtagaataggagttgctagggggttggggaggagaaggggaactagtatttaatgggtgcagagtttcatttggggaagatgaaaaagttctgagatgaatagtggtgacggttgcatgacaatgtgaatgaactcaatcccaatgaacatacacttaaaaatggtgaaaactgtacattttatcttcagtatattgtaaataaatatttaaaatgaagtaaattttatcacaacaaaaagaaaagctgtaaaaaaaatgcaggctctgtgctaacctctacgtgcattattgcatttaaccctcacaacaaacctactccataaaacaggtactgtattatccctgctttactactgaggaagccaaggcttaaacacagtaagcgaataattcatggttccacagctgactggtgcggaagctcagggagtctgattcccgagcccatgttttcaatatggcttcccacatgaaacttctctgatcctcaaatagactcatcatctattctcagcacaacagtcacaaatccccctgactgtgccactgtcctgcatggttatggcccctcgatgcctctctgacctcatcttctatttctctcccttggctgatggtgctcctgccacagcagcctcctgaatctttcttaaacctgctaaaaatgcccagggccatggcacatgctgtttctcccacctgcaaaacacttccactgagatctgcatggccagctcacccttcattcaggtcttagcacaaagatcccctcaccccagaggcctcctttgtcccctctccctaaaacaggacattctctccagcctccagcccagcacaccgcatccccctagtctcttcagtctccttcatcgcacctatcagtgcttaacatcatagtatgtccttatttgtctatttcatgacagtctgcctcccgctcctgaggtaactccaggagggcagggactttgctttgttcatgcagtatccctagaccctaaaatggcacctggcacatagtagatgctcagtaaagatttgctgaatgaatgactcaatggatcaacttcagctgatcttcacatagggtgaccaaccatcaaggctcagggatggagggggttcctaggatataaggttttcagtggggaaattaggaaagtcccaggcaaatcaggatgagttgggcactccatccttctaacaccttgctttaagtaccgttgtccctattttgcagaggaggaaactcagatccagagattaaagaacaggagctgtaaccaaatgaactttgagttcagttcctgcaagccggttttataaccccatggtttctactgtttagagtcacacacctagacagtggcaacaaagaaagagagtgctttgggaagaactagatttgggttgaacctgagatctgctatccactgactctgggcaagccattgagtcctaaatctcaagtgctttagctgcaaaatcaagcaagtaatcccaactcagaggtctatcatgatcatctatgtattatagattgggctccctgggaagcaaactcggagatgtagactaccatacaggaagtgtattaggatgtgctgttagtttcaaaacccgcgggagggaggagaaggaagaaggattgagctgagcaagaagccaggccacactacaggtccagtaaaggcctcagcagactccacggggaagcactgaagctgaggttggccctttggagttgtcccaggttgtggtgaggtagccgggcctttgggaaggggatgtgatcttgggtgaggcagctctcttcagcagaagcaattctccaagagggcaggcggctgagagctatcatctcacagtaacttcccggacctggggatatgtccttcaatcctgacgagggaactctgtgtccaccacaccatgcaacacatgagggatattgttgttgttgctcttatggaacataattccaggccaggcctgtctcactgcggagtctgagctccttctgctctgttacctgaacctcttgtgttatcacttcaaccttacttccagcaacgtctgaacagatcccatctccctatccagacagtgagtcctttgagtgcagggcccgcaaatgattcatctttgtgtggccccctcccacagttgcactgggcaccgtagccttcctgaggaagcagtgaatgagcaagagtatgtccaccctttcccagacccccgagatgtttatgggttttgaccatatcctttctaggccttccatatctccagtcctagtcagtctagccaacccccctacagcatctcccagtgtcaaaacatcgcaggcagagcaatatgaatctagaaaccactttgactttggagctggagcctgaaacccctctcttctcccactgccccagttgtctctccaccagaccgagatccaactgccaagagtcagctaattcctgccatgtagcaaacagaaaacccacaaaggtcttaggaacccatccacttttcctgctttcactccccggactctgttgcaatcacatgccttgtctctcattacaagaaaagagtttgggcagcaggtaagactaggacccacagatcttgccagccatgctcaagtcagtggccttctcaccatacatgtaccttgctggggatcttgtccttttctaaagccctgttgaaatatccccttattggtcagtgctaggccaactcatccaatgcttcaggaagggaggatggagggagtcctagttcagcacagggctcgggtgtcaggctaatgtgagtttgaatcccatctccagcatctgctgtatgatgttgagcaagttgctgtcaaagtccagtgtcattttccatggggaaagaactgcctatctccagcgttattgcaagcattaactggagcaaatggcctacagcatgcattcaatcaatgtctgtcagtattattaccagcaaggggccagaaggccccaaaaaatccagactcacttctcagatttcacactaatacatggagactgggcttataggacacaaaaatgactaaataagaggttaaaaaatgtctcctaatcatccagatgtttggtagatggagcacatataacattcctcaggtttctccccaccaatattttaccttcctcacctccttctggggatattataaatagctaagtgatactgtaaaatgttcacaggggtttctctcctaacacatatgattacttaaaaatgtaaaacatctgtacagcacaacagccatgaacacggttttggaggaataaaagataaactgacaaataaaaaaattcacagtacatcttataagcaaagagccaatttcctaaaatatagttatttcaaagccataggaaaagatcaacaacccaatacaaaattaagaaaaggacttacaaatggtcaataacctttctaataatgagagacattcccattcaaatgactatgagagatttttcacttatgagattagactattaattccggcccatattgacaagtgtgtgaggacagtggtggcataaattaggggcaacttctcttagaagaccactttgatgctagctattgaaatttcaaaggtttatagccactgatgcagaaccttcccttctaaatacatatccttcaaaaacagtccctcatatatacaaagatgtatgtacaaagatggctgataaagcattatttatatcatcccaaaaagttgaaaaccaagtaaattgccaccaatggagtttggctaaatgcataatggtagagccatacactggaactgtagctaggcactcaaaaagaatgaagcctatgtacacatagagatttgcacataaatgtccacagcagcattattcacaatagccaaaaactggaaacaatccaaatgtctaccaactgacaaatgtgcgataaaccaaatgtgctatatcctaaaatggaatattagtcagcaatgaaaaggaacaaagtatggatctatgttaccacatagatgaacttcaaaaaacattatgcttattaaaagaagctagacacacaaaaaaaaaaaacagacgttgtgtgattccatttatatgcaatgcccataaaaggcaaatctatagaggcagaaaatagactgtggttgcctagagataaggatgagaacacggagtgactgcaaatgagcagaaggaatcttttaggggtgatggagatgttctaaaattggactatggtgttagctgcacaattctgaatatttaccaaagtcaatgaacagtacacttaaaatgggtgaattttgtggtacataattcacatttcagtagaacaacttttaaaaatagaatagccaggtgtggtggctcatgcctacaatcccagcatttggaaggccaaggctggagtatcgcttgagccgaggaatttgaggctgcagtgagctataatcgtaccactgcactccagcctaggtgacacagtgagactctgtctctaacaataaaaatttaaaaaatagaataatgtagatcaataaattctcacatgatgggctgggcacaatggctgacacctataatcccagcactttgggaggctgaggcgggcagatcacatgaggtcaggagctggagaccatcctggccaacatggtgaaaccccatctcttctaaaaatacaaaaaataaattagccaggggtggtggcgcatgcctatagtcccaactacttgggaagcagagccaggagaatctcttgaacacaagaggtagaggttgcagtgagccgagatggagccactgcactccagcctgggtcacagagcgagactctgtctcaaaaaaataataataaataaattctcacatgcaaaggtgtccaggataaactgttaaatttttttaaagaagcaaaatagtataaataatatctgattgttaaagcaatcataatagtatacattagtacgtactaaaaacaaaaaaatccggaggattatataacaaacaagtaatgacaatgttctctccagaagatagggttatcagaaactttcactttctttgtggttcccttccagtaggtctgattttcttaattaggtatttttgctacacgtttgaacattttcttagtaaggtgttgaggggggagaagtgggcattatttttataattaaagatacacacacagaatgtaatagtaaaataaacaggtaaataaagagggaaggttgaaaattgactctgttttgttgatacagcctagtcccagctgaagataccacatctggtcacaagatgtatggaatctctcattctcccagctccaccgcagcctggaaaaaaaacatctgaaaaccaccaagttctgtctttctttctctcattccaagcttcccaaacaagctatgactaattctattccccaaccaccttgaagctggggagaaagagggccctagagagggatatcccccagtgttaacctcagtgtttgttgtatctagggacatcacagtttataatgcaatttcttatggattcctcaaagtctgataaaataatctgattactcagttaagctgaaaaataggccaaggacctgaggatcccatcaagatgcagagacaacaggaagacctgatggatgtgcctgacccatctttcttttcttttttttttttttttttttgagacaagttcttgctctgtcacccaggctggagtgcagtggcacagtcatgactcactgcagcctcacagcctcaacctcctgggcttaagccttcctctcacatcagcatcctgagtagctgggactacaggtgctcatcaacatgcccagctaatttttttattctttgtagagataaggtctcgctatgttgccctggctggtctcaaactcctggcctcaagtgattttcctacctcagtctccccaagtgctgagattataggtgtgagccaccactcccggcctcagctctgtcttaatttctctgagctcagaccctggcagttcgacaaacttaagtggtgttttcttaactttttgttgaagtgcaatatagaaaactaggtatacagaaaagtatacttagttaaaggagggtttttatgaagactcaaggcacaataattaattttccccttttccaatggaaacctcagtgtcactttgcgtgtgagtttatgctgctcccaagtagaggatgaaggagttaagctattaacagtccataaaccacgctggtcccagctcccctaaactctagacaaaggtatatgtgtgcatagtggatgatggtcattgtttcccaaccccaagaggtgctcacaagtcaggtggtaatagctaatgtctcaaagaacaggggctgagatcagctcaggcttccctagaaagacatctccctccagttgccatgaagaaagcaagctggggccaggcacagtggctcatgcctgtaatcccagcactttgggaggctgaggcaggcggatcacgaggtcaggagatcgataccatcctggccaacatggtgaaacctctactaaaaatacaaaaattagctgggtgtggtggcgggtgcctgtaatcccagctactcgggaggctaaggcaggagaatcacttgaaccagggagtcagaggttgcagtgagccaagatcaagccactgcactcccacctggtgacagagagagactccgtctcaaaaaaagaaagaaagaaagctggaatgacttctgctagactataagttcatgagggcagaacgtgtgtcctcctgttcatcagtgtaaatccactgctgggcatacagtggctactcaataaatatttgctaaaataaatgttgactgactggaataaagtaggtgaagacagagcctcccgggaaaccaggctacaaagcagaaatctccagggcctgggaagggctactgccagcccagatggtgacttggagcccactggaaaagattcccatttccccctgctgatgcagctccatgccggggcaaattgcttggtgagaaaaacttcccctggatttggggccccacttctcgacctggtgtccttctgtaggggacaacctccatagccacacgggtagccctctctgggatcacggctgctcctgtgcacactggagacacaaataatggagtctattccctgttgggcttctggaaggatgcccagtttgtccacagaaaagactggtctgaagtggaaaccaaaggcctataaaaacccttctctagtcaataaatgcttgttgattcatcataggcacctgcagtccaaaacctgcatcatctgaaaaaaaaaaaatgcaacatttgcccctgcccacttcctcaactccctccacactcctcagagcaagaaaccagaagagcaaaggggaaacacaaggcatcctcctttacaccagaagactgcccttttcatacaaaagcagctccctgagcttcacgccacatgccctaagagtggtttcatctgtgctgtttctggtgtgcaggcatcttcccttgcttaggctactgcaatagcccccaactggtttcacgcttccccttgcctaacaagctgttctccacactctaggaggagagatctttctaaaccagaaaattggtcccatcacctccctgttaaaatctccaattgcacatagaataaaatacgaactcttaacagggcccacaaggccctccatgaccatgatctggccaacctctcccacttcttgtgacattctctgcctcgttctcagttcattcccgatgcacatactttcttgtagtttcctctgccctttctcttttccaattccctaagcttgttgttcccaccccagggactttgcacttgctgcttcccaggcctggattctctttacctgcttttcacatgacatttcaatatcagcttacagacgtttcctgatttctcatcaggaaccattcccctccactcattctctatttcattgctctgttttattttctttgtaatggttaccattatctgaatccgtcctatttgttacttaacccttttattgacagcctccctgtcttctgtcacccctacccacctccaacacacacacacacacacacacacatgcacacacacacacaagaatataagctcatttcccacacgatcactggtaaccagaacacaacagaagcttaataaatattttctgaaggaattacaataattataattgcaagacccttaacagtttgcaaagaatactcatattcattgccttatttaacaatagaaacagtcatatggggcaggtagcataacccttatttacagatgaggaagcagtgattcagaaagcccaaggagcttgccgaaggtcacacagtaataaagaagcctgctttgcacaaacccaggctttctgcctccgagtccagggttcctccctcggtttactgttaacatccaacagtgcttcccagtcactgaacaaaaacttttaaacaccagataaacagcaaagcagttacttgcaggactaagttaaactccaagacaaaagaaaataggaagctatgaaaccattttagaaatcactgaaatagacaattatgtaaaatgagcccctctgaaatccatggatggagaagctggaaggcatccagatgtcctatctcggttttgatctgtgcttatggcatcctttgattcagatgaaggaccaggaatttgggggtaagagaaataaaaagagtgatgaaaaaggcagtatctctatccaagagttgcaaaaagaaactatgactaataaggaaaattcattgtaggaaactaaccacacgctacaggaggatggatcaaatttctcacccttcagaccagaaagtcaaaggcacaacaagcaagctgcatttgaaacaatcttctgagtcctggttcaaagaaaatgagagtccagtattcctgggaggataaagtgaggtggcctttgaggaaggagagctaagtggtggagggggaaatttactttttactctacttataatatcttttatgttttgaatatgatactgtgtgtctattttacatattcaaaaatgaactgtatttcaacaaacgatcaaaagaaagagaatgagaaggtctaggaagcaatttcagcaggtcagctcttcccactccagcctccttgttagattttacctttttccacccaatcccaaaggcgagcagcccttactttcggctcactgaaatctacgctgttcggccttcaaatcctggagccacagagttgaaaaagaccaccttttccaaagccctcactttacagatggggcccagaggtgggagattttctcaagcctccctcactagttaggaggaagcttggtatttgaacacagacctctgcctccctcccagagctgtggtccttctgtgacccaagctcctctctgctcaatgctgatgcttcattttaggtatcaacttgactggaatcagggacacccagatctctggtaaagcattatttctaggtctgtctgtgagggtgcttctggaaggcactggcatgtgaaccagtggacccagtaaggaagatcactcatgtgggttggcaccagccaatcagctgaggccctgaatagaacacaaaggcagaggaaaggcacactgcttctctctctttcctggagctggggcatccttcttctcctgcccttagacatcagaactcaggtcccccagcctttggactctaggacttgaaccagcggcctcccctcagttttcaggcctttggccttagactgaaagctgcaccattggcttctctggttctgagactttcagacttacactggccaacgctcctggattccctggatctccagcttgtagatggcctagcatgggacttcccaacctccattatgatgtgagccaatccccctaataactcccctcagacagatagacacacagatagataggcatatacacacatacacatacacacatgtatacatatatatatgtatatatactctccagctggttctatctggaggcccctgactaatgcacactcagagggcctgagcaccaactgttagtatgcacactgcagatgtatcagcccaccaggtcattctcttatgctttccctcttctgtgcttcatcttcttacttccacagacccttctagaacactcaggccctgcctctcacctggaggcaggaccatcccccacaaggggaatacaaaattatgggcatacgttttaagtcaacacaatgactggagagtactaccagcatttaacgggcaggggtcaaggtactaagcatctgcaatataagggacagtccccacagtgaagaactgccccacccaaaacaccctgtggagcagccacagcccggtcctctccgtatcgtttctctgaaccgtctcccaccttcctcctacacttcaggctggcaaagctgaatggccacagagcagataccctaagaaatgctagcccagtgctctcagaaataacttcaactcgatggactgttgcagttacgcactgtcacaaacaacgattcttacttcagtcccacgtagaggacaggctccgatgtaatggatgaggaaacggaggtactgaggggccaagtcactttcccgagccatggctaaaaactgacaagaccgcagcacatgagccacaccacggaagccacccaagtgtccctccccagaggagcggatgaacgtgatgcggcctctacgcatacaatgggatattactccgccttaaaaaggaagggaattctgacacacgcctcaacacggatgaaccctgaagcattacgctaactaaactacagcagacacagaggacaaatattgtatgagtccgctcacacgagatgcctagaggagccaaaaccacggaaacagaaagtagactggtgattgccagggaatgggggaggaacagggagttcctgttcactgggtgcagttccagtcctacaagatgaaaagtgttctggagatggatggtggtgacggttgcacaacattatcaatgtatttaacgtcattgaactgtgcatttaaaacggttaagatagtaaattttatgtgatgtgcttttcgacacaataaaaaaaaattgacaaggctggcactcgttaactgagttcctaaatcaaaatccactctccttaaattataccccagccctaaggtctaaatgaaaacattgctgcctttccaatacattgggctgtgagaaatttaactactttaactattaatggcccaatcctgtgccacaggggcctcattgagatgccagattgcttcttcaagaccctccaagggggcacgtcaaattctgatgggcctcaccttggacaaggctggggtttttagaccagctttcacagcctggtaagactccctcctccccgcaaaaggaaggggatctacagagggtggccaacttttcaaagggtattcggggcagggagaagaactacctcaattgtttaagaaaggataatttctgacacacacatacacacacaccacaccacaccacacgcaggaaatgaagaccatcatttgtgtaataaagagcaggtcttgaattgtgtgccattaggtttatgagaaaatgtctacattgtccttatttttttcaggttgctccagtgtcaagactgacagtgatccagggacctttagggcagacaacttcattgtgacagaatgagacctgtggcctttggacctcggtggggccatatgtcacccctgcaggccccaggccccccaagccaccaagagtcacagaggcagggaggggacaggaggagatcttgcccccactgcatctggctctcctgccctcaccatccgcagcagggggtacactacagcttcggctttacaaacacagggaaaaagctaacacaacctttaagccgcattaacaggatcaagggatgtattattagtcctgctagcctccgaaccattgagagtacttctgaaagacagtgcttacttagcttgggctccagattttaagagacccgttaataatttggaaggtttattagcagactgcagatccaaaaatggtcctcctctatttgggaagatattgcaggaaacaatgctctaggagagaccacagctgggccagccagattggtcaaatccaccctagaaatgaattagggagaagagatggcagccagatggctttttaaatgttgataagctgaagtgtggccagaaaaagagaccagagaatgagggaataagtcacctaaagcatgatggcagaatctaagcataaacgcttagcagagaaaataaacacaccgtccatatacaccatgcccagccccaagcccagggcagatctgatactctcctgctgaccctgacacagcctcagaatacttctcaacacagaccgccagctgtcactgcaatccagcacagttggcacatcaggtagaaactatttcccaccgctgatttaggagtacataaaagctgtctttattttatttcattttattgaattttttatcttttaattttactttttattatttattatttttatttatttatttactttttgagatggagtctcactctgttgcccaggctggagtgtagtgttgtaatctctgcttggctcactgcaacctcaacctcccggattcaagtgatcctcccacctcagcctctctagtagctgggaatacaggtgtgaaccaccacacctggctaatttttgtatttttagtagagatggggtttcaccatgttggccaggctggtctcaaactcctgacctcaggtgatccacccacctcggcctcccaaagtgttgggattacaggcgtgagccactgcgcccagcctattttatcttatcttattttatttttattttattttatttaaatagagacagggtctcactatgttccccaggctggtcttgaattcctggcctcaagtggtcctcccacctaggcctcccaaagtgctgggatcacaggtgtgaaccatcatgcctggccaaaagctgtcttcaaatgacgaaacagctaccatgaggcagccagcttagattttagtctgtattgttctaaaggagagaggcatcttgcagttccactcaagaaagactttcctagcaagactttccaacaatgcaaatagtctcatttctgaggtggtcagccccttactgcaggaagttccaatcagaagcctcatggttgtcgaggactctgcatcaggtgagagttaggacgtatgctgtgattcttgaggttcagtgtaatcaggtatgtactaagccataacatgtggcaggaacaggcacacaggttatcacctctatttacagatgagggggcttgagtaactttaccccatgaggaagcagaagatcaagaattcctatctacagaatggaataccatccaaccatttaaaaagaatgaaatcctggccaggggcagtggctcacacctgtatcccagcactttgggaggccaaggcgggtggatcacggggtcaggagatcaagagcatcctggctagcatggtgaaaccccgtctctactaaaaacacaaaaaaattagccaggcatggtggtgggcacctgtagtcccagctactcatgaggttgaggcaggagaatggtgtgaacccgggaggtggagcttgcagtgagccaagatcgcaccactgaactccagcctgggcgacagagtacaaaaaaataaagaaagaaagaatgaaatcctgtcatttgcagcaacatggatggaactggaggtcattatgttaagtgaaataagccaggcacaaaaagataaatattacatgttctcattcatatgtgggagctaaaaatgttgatctcatggaggtagaaggtagactgatcattaccagaggctgggaaggtagggtggggcggggaggaagagaggttggttaatgggtacaaacatatatttagatagaaggagtaagttctggtgttcaaaagcacaatagggtgactatggttcaaaacaagatattggctatttcatagtagctaggagagaagatttcaaatgttcccaacacaaagaaattataaaagtttgacgtcataggaatcctcaacatcctgatttgatcactccatattgtatgcatgtatcagaataccacatgtaccccataaacatgtgcaattattatgcatcaattaaagcaattttttaaaaaagaattcatatccagatcattcgaagtcctgcatgtagtccactcacctccaggagaggctgcaaacatcaagatgaagcctcctctgcagctcctgggtcctcagatgtgcctctgctgcctgctctttcctccctaaaaatgctgcccagattatcatgcaatggcccaacagctgctgctccaaaagtttcaggcacagggctcagcttccatactgctggacagcaggcatcttgtttgatcattatatctccaaacaagagtactctccacaaagggacacagatgggatccttgacattgggcttagtgtctttgtccccaaatctcaggcactatcattcttttggatcaaggcatttaaggcatctgtcccaatgcaaatgtcactaaaattgggtagcacctaaagccacattgatcactggctccctagatgattagctcatcattggccttgaggtcccaagcaaatgggacacacacaggaaagttttaatgagaggacagggaagaggatggcttgaggaaaggcaaagcaactccatccacattgctagtcctgctgctgcctcacagcccagggcagaccccacctcccatcctctcaggtcccacctctgtcccaccccgctggtgacagcatctgccttagtccccagtgcctgagtcttattcctgagtatcccagccccatggccaggacatgcatctgccagcctggacttcctcttgcctgtgtagagctgagggtctttccccagcactgccccttcccccaggaacagcagttccaacttccagcccctcctggtacaattaagagaccactggggactgggtcttcagcaaagcttcctgctttccctcaacacatttcccactgctttctaaagttatctccggccaggcatgctcatgcttgtcattccagccctttgggaggctgaggcaggaggatcacttgaggccaggtatttgagaccaacctgggcagcagagcacgaccctgtttctacaaaaacatttttaaaagttagccaggcctggtggtggtgcacgcctgtagtcccagctactcaggaggctgagacaggaggaatgcttgacccttggagttcaagactgcagtgagctatgagggcaccaccatactccagcctgggcaacagagcaaggccctatcttttaaagacaaaattttaatatgaaaaaattttttaaataaagttatttccctgctcttggtaaagagcctcccagtttaacactcccacccagactgcatttacattacaattctggctctgtccatgctgatctcccagtcagaactctgcttcccactcaccctcagagaatgtctatgtgctgcagaaagccagcccttcctgacaaggtcagtccacacaccctctcctgactccatcttttggtgctcaacgtctatgcagccaaactggcgccttatttagtatcttttccactgtctaatgaaacaacttagcacatgtgacattgtcattactactatgtattggttttatttcccaactcatttataaatgtcgggggatcaaaggattcttcttaactctgtgcctgctcagcgcctggccagggcaggactgtagtagcccctctcctttggaaaccgcctgccccatccacaggagtagggtctggctgacctagatctcttgtcaatcccatcccactggccacagtgactggttcaggaatggcctaggttgatcccttcagagttagggaggaggcatcacagacaaatgagagagagaatatgagtgagagagacagccaacagtctttccatatgtttacctccacctgaaacacacagctgggagcaatgggcaaccactgtgtacctgtcatgtagttgaagtaccagaaatgactggcttcctgagaaggaaggatgaagcagatgtgcagtgagaagacaaaatgagaggaagtgtactaccgattcgtagaacaaaccagggctccctggccctccttcctggtcccaggccagcctggggccaactgcatttccccacctggattccacaagacaccctgcatctttataataaaatccatgtatttctactaccaccagctttaggtgatttctgttgcttacaattcaaagttctgattaaagcaagggaacatgttaggtgtttagtaaactcctgcacgttgctgattctattaatgatttatcaccacagatctcaattcaaattgcactttgaatcttctttttagcatcttctgttaagtgctttgaaacaaaggcctctaactggctaacttatccatcaaccacatttgtgtttcctaacacaaatatcatggtcgcactgataccaacttgtacataaatgcccacgtgcacctagcatgcatatcactgtgattctacatagcagacactcagagcattttgcccccttcccaagagcattttgccccttccgcttcttgtactccaaaagagaagagaataatgaaaaataaatcaattttatagtcaacagcttgggtgatatctctgtgatagcacttaacagtcacataccctgagcaagatattcagcctctgagccacactccacaagacattgccactatgccaccagtgctaggggctgagagtgcagtccttgtgtgagactcactggacacttaaagaatcatctcccaaaaagatataccgcaggatgcttttccagaacagaggtcagcaaactacagcccatgagtcaaatctggcctacagcctatgtttggaaataaagtgttattggaacatagccacatccacttatttctctattgtctgtggatgtttttgcactacaaagggagggctgattggttacaacaaagaccatatggcccacaaagcctaaaatgtttatcacctggtttttacaggacatgtcagtaggtctagaagatgccaataattacactgtaaagaaaaagagtacctaggttaataagttcaggaaataatgaattaaatagatttttctacaggacttatcagagtctttaatacatagaagtgagctatgaatctttaggaaggggatgcagtagaatgttttctacacttatttgaacacagagccctttgctcagcacacatcttgagggactggtgctccaaagtcaggaggagttcctcatgatacattaaagatactcagtccaactccacctgcatcacggggttgctagggagatcaaatgcaatgcaacatgagtgtgccatgcaagccacaaggcaaacaagaatcaccccttcatcccagccactcatcaggtgttccaaaggcattttatccccgtttcccaccagccattatgaggacagacacaaatggcttcaaggcatcaactgtttccaagaacctgctgattctgaagaaccatcccagccttcatagaaaagtgcatgactgtaaggttaatgggaagggttgctgtgagattcgatttgtttccattaaagaacatcaattaatcttgattctggatggaagacaggcacttctcctctcgaagtttcaattagctcccagcactacacaggagtgaaatcggctccagatagatcatttccttgtgcaatgccatttcacaagccacggggctctgaaggaaaacagacgcccctgcagaagagaaggcctgaccctcctctccaaacacgcctgcaacaaacacatgcatacaccatgcccgcagcccttccacatgatacctacagcaacagtcaggtttcgtcaccgagtgctacccaagccaagttaatagaacaactcatttagacatgagacttggctgtttctgactcagacctctggaagcccccagggaaggctgagccggtcaggaccccaaactaggtagcagccatgacattcgtgttgaaatgtcatgccatttacaagtggtgtggaaaagggaatagagggaggaaagtgtgaagggagatggacgtgtgggaacaccacgcacccctcctccaccctgcacacttaaccctgttcaggcaggtcagagggtgcctgcccatcttctccccccatgcagactccagcatcttccaaatgtcgagtaatcgtggagcaccctgccattcccaagaaataccgccttcccaaaattgccacaattcacaaataccttcatatctgtgggagaaaggccccaagaaagggcgagtccttaaacagagagataagggaaaagtaaaagggaaactcaaaggatgactcaataaaagaatacactgaggcaaccacagtgaaaacacgaaactgccaccagatggctgtaccatggatggccagacaagctcctatgtctacactagaaataactcagaacagcagggcatctcctaagtgagaagcctgcagaaccacacagggaggggctggctgtgcagggaagtggtgttggagggtgtcctataggttgtgaaggtctaggatggacaatttcagcctgagaaccaaaaagcagagagacagagtcaaacagcgtggaagtctagcaaattctattgcagagcagggcaatcaagaggtctacaggcaggcctcactcccctcaactcgtagcagccaacagattagagctaacagtccttgaagattcctgcttctgggtaaagtgcctgcagtttctaccaccaaatccccaaacttcataaaaagattcagttctctgtctctcaccagcagatgacagagaggttctgagcctggagtgaggggcctttggagagaacagtgcttcacgtgacactcagggcttccaagcagaaactgcccagctcaggacccacctgaaagcagctctgtctcagccacttccaggaaatccatctggtctctctgcacccaacaccaccttctcagggcaaggatggtcagcagcttccaggagagaggagactactgtctgcaaatgtctagcaggctttgctgaggaagaggaagccactgtcctgaacagctccagaacaggcccacagtgtggaagttaccaggttgaagacttgggtcattataaggaaaaccactgggggccttggagccatacaatagaacagctgggggtgtttactgagatgaaagaattggaggctgactgtgtgtgagccacaggtactttttaaaagcagctataaaagcatttctgctcccactccctctaccccaaccccatcccctggcaaactcccagctgcccgcccttctgctaggggatgaccaagcagagtccacaatggcaccttaaggtcacaacagcgcagggcctttaaaacaagccatgacaccagggatggcaaactccaacacctattggggccaggcaggccgggtaaacaggtgacgcaggccaggtagggagtttaggaccatgaccaagggagagctcaagtcctgccacagaagggcaatcggtgctcatccccagaacaaaagcccagcgctgccagaccttctgacttttataaaagctgctgggaagtccatattttatacaaaatctcctcatttttacaagttggcatctaactcacatttttaaaagacacagtacaggccaaataaaacacacctgaggctggatcgggcccatgtgctgtcagtctgcaagctctgcataaaagttcagctttaaaaaaaaattaccagtaatgtgcagagcagatcctgccccgcaaccccaacccccgacccctatctctgagaaataaggcagggggtcaggggtggggtagaggcagtgatatcttttgcccacattacttggtaagaactggaagtttacatttccattttgagcctcttcagggagtcctgctttcctctatcagaaagagttttacttttgttatggaaattattttcctctactgggctgcagaaagcagaaaatctcagattggcagagaccttctaagtcacctagaacaaatctccctctgatgcctaaatccccactcttgacaatctcttccagggattcatcacccagcctcgagcacctcctacgcctgggagatcaaggcttaggagactgcctgcctgttccttcaagacagctctaattgttagaaaggtcttccagacactagacttctataaacgcagcccagaatcagattaggttttttggcaactgcctcacagtgactcacagcaaaactcactgtcaacgagaaccttaagtctttttcacaagtgctgctgctaagcacacctctccccagtctacagactggttttcagacataagggcaagactttacactttttcctcattaaatttcagcccacctacatggggtgatgagatggccatccattcacagctacaaatctgttaatttctcagattgttttcagaggaccatgaccccatctctgcccctcaaattgttgaagctgatggctcttcatttcatcgataacacagatggcaccatgagcacctgccaggaaatgcaacctgctattcaccttctccaaaccccgtctgcaggaaatgatatttatggaggattggctcaaggtggatccattcctccaggtcaaaaaaacccacctgcccacaggagccaagcaggcaacagaaatgagcaaagtgggccaggtgggcactggcacaagtccgagcccctgtcccattggaagggaacagccaatttttgcctctgagaatgagggcccagtgttcctagatcttcccattttctaagagctgccagaagtctggatttttacatgaactcccctgattttttttaactctcttcatttttaagtgttggaaatgatgaattcatttttgtaaatcctgcaaaggccaaacaaaacatgctagtgggtctaactttgcctgcaagccatccgttctgccatgaatgttgtaaatttcactcttggattgaatcgacccctcaaaatctgggtaagagtaataacagagcgcacttattgagtgtggcccacattccagacattgggtaagcatgggttatgtcatttaatccttgcaagagtccaatgggtgcccatttgaaagaggaagaaactgaggcatagagaggggagatgccttgcccaaggtcaagcaattagtaagtgacaatgttgggattcagtcctagatctgtctggcttcccagtccaatgcagagtccttggaccacactgtttgggcagaattacttcttgtgaattgtgctttggtgttaaaattatcaaattacattgcgatgtttttaactactaaaaatgcattacggtggctacgataggaatgactaaggacaccatctaatgcatcactgggtcttcagtggcctctagcacctgaatgcccctccctcattcccctcaggggttggggggcagtcagagacaaatacagcagcacttcttgttgggggagagtatcctgcccttgagtaaaacttcaaactcatccttaaggagatgacaaaggttttactggaagtaatgacagggagtctccatggtgaagtttgaaaggatgatggtaagtcggaggcagttttccatcacagacatagaatggtttgttatgctgtcatgcaattctcattgtacaacccaatctgatgatcatagtttgagacagaaaataaagcataacttcttggcctaatccaaaggtggcaaactcaaacacatgtagaaaccaggcaggttaggccaatgacaagcagcagcaggtgtaagagaagggtgtcgtggggacccaagagcttctgggatagggaggtgtaggggctcaagagcacataccttgtctaaaaaaggcagccgccagtcagctctggctgattggttactgcatgagaacaggcacccagtgccgccagatcatgcaatttgcttttaaaaagtcagaaatgcagatatttaaatgaagttgcccaattttgttgtgcatctcaagtaaatgcaccactggccaatgctagcaaatgcacagccagaccacttcctgcctagtgctcagggttggtccagaaaaaaaagtaagttgaatttttctcctgttgagtcctgaactgcttcaaacatccagagaagaggagggaagccagagaggccttcctaaatccttgggggttacactagccagctcctggatgcacggcaggcaccctatggaggggtgctggggatgcagcctggacttcattgatttcttctgcagtaggagacagctaacagccacatcctaagttgatcataggtttggctgctaagttcttgggggcaacagaagaaagatcaacaaggtagaagaaggagggtgatgttgacacctagcaagctaaaagtcaactctaggccgggcgcggtgggctcacgcctgtaatcccagcactttgggaggccgaggcgggtggatcatgaggtcaggagatcgagaccatcctggctaacatggtgaaaccccgtctctactaaaaatacaaaaaattagccgggcgcggtggcgggcgcctgtagtcccagctactcgggaggctgaggcaggagaatggcgtgaacccgggaagcggagcttgcagtgagccgagattgcgccactgcagtccgcagtccggcctgggcgacagagcgagactccgtctcaaaaaaaaaaaaaaaaaaaaaagtcaactctacttactcctccccaaatcagggttattattaagggcatagtagtccacccactggaaggaaaggtgatattatggactagctaggttctacgatacagtcatgaaccaaaattcccagacattgcacttctaagaagctcaaaggttcagtctgggtgggtccagacttttgacattcttctttctgtggctaggtaggcctggtcacatctgggagagaagcaggagcagtcgtctagctggtccctataggaaaggggtcagatactccagctgtcccccaaggctgacccactccagatcagcttcctctaccctggagcaatagagctgagattcaggtgtgggcccggacagaggccggcatggcaacctccctaggccaaaggcgttctccacgtggagaacagctcaccagaattctgtgttcagccacagctttgagataagatttcatttcctagccagcggcctgtgtcacacatatctcgctagaatctcttggggaggggccaaaagccactggacaagggacaggatggggtcagggcctgaggtctggcatcctaaccaaatgccagttggtccctaccccattcatatttctatctatttataggataaattcttctcagggctcaagatccaaaacaatgtagcttctttcaatgagtgggtggtttttctcttaaagatactattaaacttcgcatttttagagtcaattcctcatcccctcctgctaagcgctctgcttcctggttctctctgccacaggattcgctgtttctctgaatggtaacctcggtttattgagtatctgctatgtgtctattctggcctgaatgctttatttacagcaactcccaaggtaagtattactgtccttattttacagaggaagaagctgagcctcagagaagttaagcaactcattcactgacagcactagaatttaaacccagactccagagcctgcagcgcggctcttacagttgtgatttattaataacaatcggtgacgctgactgagtgccaggcactgtgctaagggttttacacacattatctcatctaactggctcaataactgtttgaggttggattattattattacagatgatgacagtgaggctcaaagagatgaaaacacttgcccaaagtcacacggctagaaagtggctaaaaggttgcaaaccctggtcagttcaataccaacaactgtgttcccaattactaagcctgccttccttggtttcctgacattctcaaactggatgggcatgctcacatcctcatccaggtaattaaaacactgaacaggagacagccttttggcatgccactggagacttcacctaggatgacaatcgtacccccatgccagaatcacatcttcaaacagttatgaactcatctaatggtgctacctgattggtctgtgcttgggaactggtgtgggagagggaaaaagaaagcatggatttgggcaggcacagtggctcatgcctggaatcgcagcactttggaaggataaggcaggaggatcgcttgtgcctaggagtttaagatagcctgggcaaaatagcaagacgctgtctctacaaaatttttttttaaaattagccaggcatggtggcatgcacctatagtcccagctacgcaggagtctgaggcaggattgcttaagcagttcaaggctgcggtgagttatgatggcgccactgcattccagcctgagtaagaccctatctcaaaaaaaaaaaaaaagaaaagaaaagaaaagaaaaaagagcagactcgtagcaggacatgaaaaggggccaaagctgagatcggtcccctgtcttctaactgcaggtctaccccagggctctgttactagatttggcttcaatcctccccctgcccattcagatgataattatcagggtcttggaggtaccacagcccccaaattgaatctcagataatccttccagctttgtcgagccactggaagttttcccacttccaggggaaatagggactttgtggtttatcggccaaggtctggggtggaagccaaaaagggcttttgtccaaggagctcagagaaggcttcttccacagctctgacaaacaatagtgtaactggtgatctgggggggcattcccgtttcttgggagacttttctcctagagtatcaggatttgccttctcacaatcccttgtcattcatcttgcctcccttggaaacggccgtcacccatttggcagtaatgaggatggaaggatgcggttctgtctctttagaaaactgggcaattaaattttctttaatgaagttctttattttctcctagcaatataatttctgttgtggatttggataaatgttttttaattcctttaaatagaaatggaagataatgttttctggaagactatcttaatatttttataggccaacaccgaactgtgtgtgtatttttctctccttgatagctattccagaagttgctttgaatgcctcctgtgtggcaggccctaagcacaagaattcgggaatgaataaaacaaggcttctgcactcaatgagctcacagagggacagacacataaacaaccccactgtaatagcagcatgtccagggtaggagtgggacaaaaaatagaaataatgaacatttccgcagcactcgagagtttactttctcacacaccacctcatttgatcctcacagcaaccaccctttaaggttgataatgccctcatttcacagatgaggaagccaagatgcagaatgaagaatgcagacgtgactcgctcaaaagacagaccagagatggaaaatcgggtcttatgagtctaaaccccagactctggccactgcatcacgatggctcctgactgaaactcggtaaattaaaaggttaagctgaacttttccactcttctacccatatttcaaagttttgaaagagtatggaaaaacttcctcactgcgtgggggaataattcggtaaaatattacgtttcatttcagcaatcatccttacactacataatgagcaccacagtaagttcagcataatttaaatagctcttgcaggtgtcactttctttcttttacagttcagctgatgtctgagcatcctctctagcaggaattttgccaacaaagtccttacttactgtcaacttcgtggaattttaaatcagaaaaggaatacatgctcatttttttcagaagccaatcaaaattgaacagtataaagatgaaaaggtcttctttcccctgtcccctgacactaccaccctattccacccctcgtccccaagggtaaacctcattaccaatcgtcaaaaaccaaagactctttttatacatatctaaatatataaggacatagggtttttatttttaaaactgtaatacatacacacacagacacacatacacacacacactttgggtgttatttttcccacctcactcagcaatagtctacctaattattaaatgttcttttgctttcaaaaaaaagatacacagccaaactggtgagtttactatagaccagggccaattatgttaagttcatgaaatctgaggcacttgtaaaatgcagattcccagggtccacccactgccccccaacagagattctgattcagtaggtctggggtggttcctagaattcaagttccttgaatttgttacaagttcctccaaggtgattctgctgcaggtggtccaggaaccacactgggagaaacacacacataacaggcaaagaaagtgtcatgcctgtctacaacttactagtattttcttttcccagctacccatgctgccaactccacgtctcctgatgtcttttagtactgccccaccttactctccttcccaaccaggtgcacttactaatggcttcagctgttggttcagaatcactgtccaggactctgaatgctggtgccccacttactggcttagccgacatttctagtgtttaattaatgctactgtgtgccaagcactgtgctggaaattctgacttatgttatttcaattaattacccacacacacagtgaggtgttattatgtccctctttcacatgaggaaactggaactcagaaaagttaatgactttcatccaaggtcattcagctgattcaccatgagccgtgattgaaccccggtctgggtgactccacccagggcatcacagctgcctccttccacgttacattccactttcttgtctcatctatctctgtgactttagcttaattctatcaagagaaggtgggtttcaatcttcttcagctgattcctggctttaatttcaccttaaaagcactcatcccacgatggtatttaccatcctgaatagagctattataaaatcccctttctggaaccacttttatcttttacacctggagttgtgtgtttctcttagaagcactgatctttctgaccccttaaatattttgatgacttctgacccttctctaaatggaaagatggttctgtctagatcctaaagagctcaggaaacaatgatggtgaggtaagcttagtcaatacaactcagctttacaaatcagtatcagtaaatcacccacagcattttcagccctttagatccatttgctatagattcccccatgcacactgcaccactccttccataacactcaacacttttgtaattacaaattatcctttgtcttccccacagaattataaagtctgtgcgggcagggaacatagtaggagctcaataaatatttgttaagctaaatctatgtgaactggcccaccacattctcagcatttctttcacacaattcccagtaacataattctatgtttctggcagacagcagtagagcctctgccatttttggagcagagtttcaatggtgatattatgccaagtacgagatccagcaagacagagatgctcagggtggggcctgaacctggaggatcaggccaaggatggagccctagattagctgagggtcacgggacaaataaattcaaacaaccacaaccaggcaaatgatcaagggtccagaagatcggagcaagaggtcaaggagtaatcaactataagacgtcagaagccagagagtgactgttgttctgcctcagtttccccaaggtaatagatctttgggagacccaaaacatcctgtctggagaggccactgatcaaagtaaagacattgtgactgccaactctgcttggaagtgtcctaccgagacactgagttggagaacagccatgtcgcttggccagttcacattctttagtacaaattaaatcacagacatgacatccattcttttgtgtccctgaaggtggctgagatgtttcattggtaagagtcttctcatgtcatttctctgaccctcttaaggcactataagctatagaaggtcccctaaggaactgtctcatcctgccaagcttgaatctctcagcgagaactctacccgcctacagaaatccaggtctttctatttgacaaatggttggaaaacttactgatctacattaactgtattttgaaaatgctctcaccagcaatcggaagcaaggggatggcaggctacatctgccaggagcagacaagcaatccggaatccaaaaagtatcacaatggccaggaaatccagcagagagcaacaaggaggaaaggaaaggtagaccagggaacaggtaccagcagggagggtctccagctgctgaagatgaatcctttgccctagacaagcctctccctttagcacttgctgccaaagacagaaactgctgcctaggaccaacagggaaataagactgtcagggatgggaagggggaaattctagctgaaagtggctgggacaaatgtggcagtgagggaagttcttgatgagttagctcagttccccccagttttacccaaatcacaaagacctgagacagaagtgaccaacacaagccaggcgccacaagagagtggtgtcccctccctaaaggaccattaaaacggacgtaggaggtcacgcatattgatgttcttacttgacaaactgtttatttttaggccatactctatttcaagtcctcagcctataggcctatgattattttcctatcagctttatttttataactctgccttaaagatctatgatcccatttttattatacacagatataaaacaaatgtgattgatagagacgtgaagtctggaaggaaatacattgaatgtttatagtggttatttcaggtaggggcttctagattcttatattttccttaaaggagtcaaattcacacaaagagtagcatggtggctgccaggggttgggaacgaggaggaaacgagtagctattttttttctttttcttttttttttttttttttgagatggagtctcgctctgtcacccaggctggagtgcagtggcatgatctcggctcactgcaagctccacctgccggattcacgccattctcctgcctcagcctcccgattagctgggactacaggcgcccgccactgcagctggctaatttttttgtattttcagtagagacagtgtttcaccgtgttagccaggatggtctcgatctcctgaccccgtgatctgcccgcctcagcctcccaaagtgctgggattacaagcacgagccaccgcgcccggccaaggagctattgtttaatgggtacagagttgcatttcacaagatgaaaaaagttatgaagatgggtggcatttaatgtgaatgcatttaataccactaagctgcacaattaaaaatgggtaagacggtaaactttgtgtttgtgtattttaccacaacaaataaatacgactctcatccataccatcttcaaggtcaaagacttacaggatctgatgatcagacaggaacttcaagctcttctcctttccagcctcatctcccaccaccattttgttccacctactcaggattttagccacctcaaactcctcaccatttctcaagtaccctgacccttttgtgacccccatacctttgcacatgctgtcttctcttcaggtaatgcctttcaccacctggagagcttctattcatccttcaaaatcctgcttaaaagatccttcttctataagagtttctccagctctccctggtaaagttgaaacttcattgtaagtttccacagtgcctggttctaccactgtcccagtacttactacactgtgtcataatttattaacctatttttataacggtctgatagtttggttgtgtccccgcccaaatctcatgtcaaattgtaatccccagtgttggaggtgggggctggtgggaggtgattggatcagggggatggatccttcatgaatggtttagcaccatcactttggtgctgttctcatgatggtgagtgagttctcaggagatctggttgtttaaaagtgtgtggcacttccccccccctcttcttcctactcctgccatgtaagatgtgcctgcttccccttcaccttctgccatgattgtaagtatcctgaggtctccccagaacccaagtagatgtcagcatcatgcttcccgtacagcctgtggaactgtgagccaattaaacctcttttctttataaagtacccagtctcaggtgtttctttatagcagtgaaagaagagattaacactgtcttttcatagaactatgtgtctgagatggggatgcaaaaattggtgaaatatagttcccattcttatctttgataagacttaagtttcataaaactatgaaactatttttgtgtccccatctcagacacatactaggaactcaattaatagaatatatgccagattccctgcagtattcctgcaatcggccacctgttcacttcacttccttctaagtcatccattgggtggctctgcatggatacaattatcccatctctggatttttcatcttcctgcattacgtctcaatcagggtttggggaaagactggatctgcttcagtatgcaccccaaaacgtaatatctatgtgttcttgtatgcaaagtccatcacaagaacacctataatcattcattcgttcaacaaaaattgtgaccattggcacctagaacacccattgcccccaggggacatttggctatgtctggagacatttttgattgtcacaactgggagcggggatgctactggcatctagtgagtacaggtcaggaatgctgctaaacatcctacactgtgttctaggtgccaaaaaacactaatgaacaagagaaatcaaagctcttattgagtttcagtcctggtgaagagaagaaacaaagaaagcgtgaaaaatatcatatagcttttagtgctctgctaagaattcaggtcagctgatccaatagagagttgctgttcggctacttaagatgggttagtctgcaggtggcatgcaacctcaaagcagaataccaagaaggagccaatcaagtggcaatccagggcaagagcattccagaaagatggaaaatctaagtgcaaaggcccaaagcaagtacaagcttggagaagtccagaaaccagtacaggccagcatgactggatagaatgacaaggggagagtgaccaggggagggaaagaggtgagcacagcgtggctttctaagtgcagttgaggggcttggattctagtctcatgcaatgagatgctactgaagggttttaaacagggaagtgacatggccagatttaaatggtgtacagattactgctggctgctgtggggagagtagactatgggacaagaaaagaagcagggagaccgcttagaactgtggttctcaactaggagtgattttgtccccaggggacatttggctatgtctggagacatttttgattgtcacaactgggagcagggatgctactggcatctagtgggtacaggtcaggaatgctgctaaacatcctatgttatacagaacagcaccttcaaccacaaatgatccagcccaaaatgccaactgtgggtgagaagctctgagtcaggagaccctgagaaactttgggttgcactggtcccagcaagaggtaatggcaggctaggccaggatggaggagatggagaaggaaggaaattcactgtagttaatactttgaaatattgaatgcttttctccaaattttcttgacccccttggtccctcctcagtcagggagggcattctgtgttcattgcctcagggataatgcagaaaaagagtcaattcttggcattttttcaaaagtccttagggaggagagaaagaacgtgagatttatggaaaacagctttgacagaatgtctgatgacaaagccaggataccacccttgttccccgccccaccacacgagcatatgggtaaagatttcctagaccaaagtggagagtaaatcagtaaagcaaagtatatgtaggtacagggatctataagaaaaaaatctgcaccctgcccaactcatcccgaacaagcccggggagggagatgatgaggcaaccaccaaacagattcacagaatctaagagtggagagaagccggatcccttccccaggcagagccctagggaggcaccaggggagaagcaagtgttgagtgtggccaagacaggcctgaggcaaatatccagggtccctcatggcccagtgtggtgtgtgagcagcagaatcgcctctggtgccagcaaattgcatggaaggaaccaaggagagggggacacatgaggaacaaagaaggattgctgacacagaccaaccaccaaagactcaataagaaagaggatgtcccagtagctgccaaagtagattgatgataaaccacaacagatgtcctcacaagggccttggtgctgcctaagtccccctggatcttggagcacaaccctggagggaaaccccaaattgacttatacttatttctgtcacccccagcagaataaagatgtgaggccggccgcagtggctcacacctataatcccagcattttgggaggccaaggtgggaggatcacttgaggtcaggagttctaaaccagcctggccaacatggtgataccctgtctctactaaaaatacaaaaattagctggacgtagtggctggcacctgtaatcccagctacttgggaggctgaggcagaagaatcacttaaatccaacaggcataggttgcagtgagccaaggttgcaccactgcattccagtctgggcaacagagcaagactctgtctcaaaaaaacaaaagatagagatgtgaaatggagactgagtcaccaagaaagaaagaaaaatatatttcttgtgcacctgggtttgtagctgagatttgttcactctgaggcacaagggaacatgggcttctctgtgttcatctgtgccattatcacctagcactggctatgcaatcccagggggaagagccaggtccattcaaggaacctggaacactctgctgcagcagtgtgcaccccattaccatcacgcacagatgggcacacgcaatgcatattgattagggctgcactgtttccaaattaccatttaaatcaatggttgagcactctgtaattggaaatgtcaaaatccacatttcctaggtgaactcaaagcactacattgatatcactcagctcaactagatgtgcatttgttttacttctttccctcttcaaactgctctctgagacaagtataaaacattagggaactgagccagaggcaaaaagaaaaagcacccagatgatccatgaattgtgcagcctgacatattctaaaatgtaactcagaaaacagagtcttgtgacccagtccatgaaaaatatctacacaatcaagtaagtttgaggaaactccatgggccctactgagcgattcacacttaacacaagcaagattcccagaagtcctgggggaagcaggcctatttcacactgtttattctagaacttccaaaatctattagagcacacaactacttttttttcacccaacacctctttacaaccaatttaaaggaatactcttagggaacattatcccaaacataaactagcataatgattcaacaaactgagggaatagagttaaagtgccattatttgccagccaagatgttttatgaacaccaacaagccatcaggaatgaatattttccaagtgaaatcaagcccaagacagcttcctgggccctgtattaagccagaagttctcaagctcagcacctttaaaaagtcaaccccgtcccttcctaatagctgtgaaggaaaggactcaatttcaggaggcagcccaaactcaccccctcctgacctcaccaatccttacccggctagacacccttgcctcatctttctttccaaggtactactcagctctgcctccccaggcaaccatcacacaccagaacaattcaactcagtaatatgtattgatcaccaactagatggtgggcactacgctacagcaatgaaccaagcagataaaccttccaccgtcatggagagacagtctaaaagtaatctgaaagccacagcccctctccaatcatcaatttccacatctgaaaaacaaatagagttggactagaagacacctaaaatttctggttccgtatttccaggttggtggtggactgggctggctggtgagaggtagctctggcagcctgcatcacagccgtgcgggcagttttgcagtggacactttcccaaaggtgacttcctggggtgggattgaagggatctgacacaccgcggtggcatcaagtgcaaactaggagaggctggattagcaggagtgtggaagtgtcaggaagggaaggaagtcaaaggttaagacccaccccacacttcccccactgaaggaaccccttgttgccttggcatgcatgttgctttcgtgcaccccggaaagtgaggaagatgctgaattaaacctagctctgccactgttcactgtgcaatccagtgcaatttgttttatttctctgaacttcagactttaatctataaaatgaaaataataatgactacctcacagagttacagggatcacaaaattagatactccatatatgactgagacatagaagctaaaaaaaaaatgaattacctcccactgctaaataaagctatacagcctgaagcatggcttacaaagtcactgaatgaatgaataataggagtttctggaaaggaaatgtcatctccaacatataaactctagtagtaaaaactccagaaatggctaatatgaactctcagatccattaatttccccagactgggaggggcctggaaggaagtgctccctagaccacaccccactgagacggctgtcaacataacagccttcaccaaatctccactaagaaacatctcatctaccaaggaaatgcaaggaaatcgagcaaaccattaagaatatttcctctcccagtgaaacctctactttcaatagaataggaagcgtggatgttattatgagttgaatgtttatgtcccccaaaaatgcatatgttgaagccctaacccccagtgtgatggtatttgcaggtggagccttggggaggtgattaaggttagataagatcatgaagatgggtccctcctgatggtattagtgcccttataagaagaggaagaaagccaaccaggcaaagtggctcactcctgtaataatgctctttgggaggccaagacgggtggattgcttgagctcaggagttcaagacaagcctgggtaacatggtgagaccccatccctaccaaaaatacaaaaaaagagccaggcatggtggtgtgcgcctatagtcccagctactcgggaggctgaggtgggaggatcacttgagcccagggggtggaggttacagtgagctgagatcacaccactgcactccagcctggctgacagaatgacaccctaattcaaaaaaaaaaaaaaaaaaaaaagaggaaggagcgaaagggagagatttctctctctccataagcatacactaaggaaaggccagatgagcacatggctaaaggcagctgtctacaagccaggaagcaggccgtcaccaggaactgaacttgccaacaccttgatcttggacttcccagcctccagaattctgagaagtaaataaaagccatccgggctatggtgttttgttatagcagcccaagccaactaagaaggatatcaaagaaaaaagctgaagccgcacagcggctcacgcctgaaatcccagcattttgggaggccgaggcgggtggatcacctgaggttaggagtttgagaccagcctgggcaacatggtgaaactccatctctaccgaaaatacaaaaattagctgggcatggtggcgagtgcctgtagtcccagctactcggtaggctgaggcgggagaattgcttgaacccagaaggtggaggttgcagtgagccaagatcgtgccactgcactccaggctggaagacagagcaagactccatctaaacaaaacaaaacaaaacaaaacaaaaacactgagctatgagttataagattaaaactttttctttttttgagacagcctcattctgtcacccaagccggagtacagtggtatgatcatggctgactgcagccttgaactcctgggctcaagcaatcctcccacctcaacttcctgagtagctgggattacaggcatgtatcaccacacctggctaatttttgtattttttgtagagacaggattttgccatgttgcccaggctagtctcaaactcctgggctcaagtgatccacccatcttggcctcccaaagtgctgggactacagacatgaaccactgagcccagcctaaacttattttagtaacttatcagccactccttcaaccaatcacatgccaagcactttggagaaacaaagatgaccataagcctctctgccctcaagagttcgtggccaaagacctaaacataaaatttcaattaaggattataaggtttggaacagagggggagatatgaggggaccactaattctgcctagaagagtttggaaggcatcgtggaagaaggcatcatttgagtagacattgaagggcgatcagaagtatttgaggcaaataggagtgggaggcagggggtaaggagagtaaaggcacaaatgggaaagacctggaggaggggaagggtatggaggatttagagaaaagggattggtcgccaggcatggtggctcacgtctgtaatcccagcattttgggaggccgaggcaggcggatcacttgaggtcaggagttcaagaccagtctggccaacatggtgaaaccccgtctctactgaaaatacaaaaattagccaggcatagtggcgcatgcctgtaatctcagctacttgggaggctgaggcacaagaattgcttgaactcgggaggcagaggttatagtgagccaagattgtgccactgcactccagcctgggtgacagagagagactctgtcttaaaaaaaaaaaaaaagagagagagagagagagaaaagggactggttttttgcgtttataagagcacaagcctatcacagagaaaatgactgaagatgaaataggaaaattggctgaggcccctcaccaaggcttcgtgcggacttcaacttgtagaccagattttgcaaactggtggcccaacaggctaaaactgttctaccgacatgtttgttcaggaagcatagtgtttttaaatttttaagccaccatttaaaaatcaagagattttgcttaaaaatccagattcccttgaaacactgaaggaactgacctttctgggctcacattcctgcctaggaagagcaggctggagcagcatctgccttctctagaggaactccccacttggccacagcccccactactcccctctgtttgcccagcccagcctgctttcttcattttatcctgttgaaaccagcgagcattcctaaggtgatcttctaatcactgcatgatatacgctctaagattcagttcgttctggctctcgaagtttttgtgtttgggatttttttatttctttctctcatttttatcaccatattccaagaaaactcttagaaagcaaagaatgtatcatatactttgtgtctctcacaacactcagcacaagactaggtacaatgtagataatcaacttttgttgaattagtgcagaaatgaatgaataaatacatgcccctctgtggtcatcctccatacctgcccttcttcctcaaacctctagacttttgctactaagaagatggatgaatatgtaacaaaaaaaaaagcaccaaagtcaatcattgcatttctatttcaattttctatcaggttgcaatggaaataggaactctgaatagatgcagaactaaccatcatgtctggcagcaagatgaattagagccccaggatactgagaaagcctgcagataagatcaccaaatatcatcagtgatctttgagggaattgtagagaataggataggtgccaaaaagctggagcctggcaaatgttctgattttcaaaaggggaaaaatgttatggtttgccagttccagactagataatatgatatcactcccggcaaggttcttaaacagatttgttaaggacacttatgagcacctaggacaggaagtaatgtccatttggcaccagcatggggtcaccaagaacaagtcatgttaaatgcatttcattttcttctctctgacaaggctcctaggctagtgtattggagaaacacagcagacttaatatacatggtgcactgagggggtgagcagcaccaaaggctaattcaatccttgggctatgttaatagtagtattgcagacagcagaaaggaggtgatagttgttttctgtctttggccacatctagagaaccacatttagaactcagtgccactcttgaaataggatactgataatataatcttttggaggtccttttggcaaaatctctttaaaaacataaagctctcatccagatttctggcatctgttgaaaaattgaaaaatctgtctgggcctacattcctaaacagcaataattggttgaacctaagtagtgactgcccatttagacagaacatgtactctgaagtccgtcacaatcaccaccaccacccttctactgcctgcactgaggtggtaggccagctgccacaaattgtttcacgtggccaactttatccatttattctatctgccaagcacccaatgacactgaggtttgcaacccaggatgcagtagagacagaggagagtggagatggtaagtggtagcgaaccatcctattatatgaggataatcattgtcaggggttatattcccaggctccacacacccagtgggcagtccaagggaagacacatctgtcttattttgtgaagtccaaagggaaaggaactatagaaccaataagtagatgagagacatattcaatgcaacataagaaaaaatgcttacaagggtcaggcacggtggctcacacctatgatcgtagcactttgggaggccaaggcgggtggatcacttgaagctaggagtttgagatcagcctggccaacatggtgaaaccccgtctctactaaaaatacaaaaattggccacatgtggtggcacgtgcctgtaatgccagctactcgggaggctgagggaggagaatctcttgaacccaagaggcggagattgcagtgagtcaagatgacatcactacattccagcctggacgacacagagagactctgtcacaaaagaaaaaagaaaaaatgcttacaagagccagagctgtccaaagatgatagactacgtgggcttgggaggtagtgagttccccatcactagaaatgtgcaagcatatggtttactactgcttcataatcaaaaggcttcaagtatctgatgaggcaagagaaggcatgaatccttctattttacaatagaaaaaatactgttctaaaacattcctttgtgttaggtctataaattcttgaaaaagacataaaagggaacaagtcaacaaagaactcagcactgtttttaaaaatcaaaagttcccttcacaaaattcacaaagcacaaaatctgtctgactaggtggactttttgcatcccactggccagatgattcccagggagaaaggtaattggcctcgggcactgtttttggtgactggtcaaatgttcttcagaggcatgcaacaaaggcaacgggatgaaagtaagagggtaaacaatggaactccatcaagaggctgccagtccccccacaaaactgccatctgctgctgacatcaatccttcaaggggcagcttcgggcaaacaatgtgtcagggaacacaagcctgggagaaaatcggccttgtgaccttgggcaagtcatttaacattaactgggcctcagtttccttgtctctgaaactgagttcacactaaccctactgtacattgtgtgggccaagagtaagtgatgtctgggagttagccatagaaaatgcagggccctagacacacatcaataattatgatggtgattaacacacagaattttaaaagaaaagattccagagggtttcagggacagccatatcctgacctgaccttgtgggtgtcaattctaaaggaataagatgtaactcctttagccagaatgcaaggaaatttagtatttggaagagacaagatcatttggacacatttcctgatgaatgcctggtaattggtgtatttctgataaaactcagggtactcgctgcttagttgttaaaataaaagatgaaaggtaaaaagcaaaaggatcagccagggcaattaatgcctaactggccctgaagaaaagttcactggcccagtagtagcaatccttccaaaatgagataagcacatttcctaccaagaaaatatcataaaacctgaactgtccaaaactcaacatccccttctctctcaaggcattttcatggcaaccttaatttttataaaataataataattggccaaattcattttataaaacataaactccctaaaaagagtctattcaaagattgaaactaggcttttgtattgagcagttgggtgaattaaaatctctgaccaataaagcgcttatttctaaattttcagcaaggctgagacatcgtaagtcactgttttccacattgaactgaaaaaccaaagacaggagaccagggaagagcagggttttctgctcctcttgccctaggatatgcccagaggtgatgagcacgctgggcttttgaccaggactaaaaggcaaaaagactgttggtgagactggaaaaaaaacagatccctccccccgtggctgctccactcccaaagtttcccaagcatctgaagcgtgtatggcagctgcggtgcccagccttcccgctgcttttaaggaggccacccagctccctgggtcattgggtcttcagttgcagcagcgcccagaagcaggtgtggcaacctcaggttgcttgagccccaaatacccaacttgctcaacagcctgtgcataacctcaaagataggcctcaaggtccgctgaagatgcattttgtctttactctttctaggagaggccacaacacaccctgtgtcgcagcaaggagaaccatgaccagaaagaaagcggacgccaagaggcacgagcccaggcttcccacagggcacatcctcagagaaaggaggagcctgctggatggagcttttagattttccttgccaaagctgagcctagaacgtgtaggggtgggagaagccccagtctggcctgaatgaggatgcggcaagcccgcatttagccatgcaattgtgttccctttcctatttcgcctggctagcgtggatttagggagcggcttctgaaagaagtatacacccggtggcacagaaggtgcaaccagcagccagaggtcatctcgccctcccggcaggcttctcctggaaccccggaagccaggcagcgctgaccagcccaaacggcatgccgaggtgttggctttgaatgaaagctgatgaacctaaacgccagggcacagagtgattgggctgcacactgcgagataatacattttctgcaccaagctccctttttatgcccaaatgcctgcattagtctggatcaatatgccccataacagttaatccatggcaacccaggccagcccagagacaccgacaaagaagtgccgcccagggatgctgcctcgctgtgcacatgcatgtgaattccggcccagagaaagaggcggaggcaaaaccaccaccaccaacagaaaccaaaaagggggaggaaaaaaagagcagatggtaaaaaaataccccaatattaaagggcttttaccatggcagggaaggggtggaggtagtgactatcaaaatggccttagagtgacatgtcaccgccaagatgatggggtatcagcgacactcctaaagtcaggcataggatcctcctcacacacctgcaatgcagagactgctgcccattccataatccacactcccagccccagcgctatctgcagttgaaaccagtccggacttgtgcggctgccactgttactcctcacaaaaagattattgatgcataacatttcataatggcagagaggaaaacggggggcagcgggggatgggaaccagaacaagagaaaaacgaaaggggaggagaaggaaaactctcccagcccgcatctcaccttttatttgggcttcatattcagcaatgatctctttgtctttcttgaacttagtttgagatgacatcttctgacgtggccaaaggaactgacaggctgtttgatttatttctccttttcttttcgagtcctctctcaagccctggtaatcacacagctctggtcgatttcacaggtttagggactaatctctttcacttggctgcagagcagggagaaaaatccttctccttctggaaggaaaaatctctttacttgccgagaaatggctctagtagcttgccctggtcagctcctcttgcaaaagaagaatcaccctaggagcacagtaacctgccccagattttcaaagatttttcttccaaaaataataataatagtaataaccaagcgcactcacacacacatgcacacgtacacacactcacgcatgcacaggcacactcaccgggacacgcacacagttgtgctgtgcacacaggcatacacacacacaccctcacacgcacacacactcgctggatcactcacacacacacatccacgagaggcgcggcgcctctttggtcgtgcagccagcccctggcttgcttttgaaggctctgctaagtcgatggtcaggttgccaaagggccggtcatctcgcatcctccctcccttcggtgcctctggtctgatgtccagtgaggatcaaagccaggagagcgagatggaagttttcctgctgcaacgcttaagctccggtgaacacaaggctggactgctcgccctgcagggctggctgagctctcccccactgctcacgtcactagactccgcctcccggattttataacaactgacacattgtagcctacaggagagcagaactcactgcaagcaaaaaggggaagaaacgctcacaaaagggaaggcagcaggaaaagtaatcgggttggtaagtcttgagaggcttctgcaaactccaaacattagcacttgggttagggatttttcttccaaaaacttaagatcctccctttttttgcactgtgcaatttaattcagtttctggaatcaacagctatatgatggtttgtcactctactgggatagtctagcagagggcctgacccatgtagggaaaagcatcaatatttgttgagcagttacttggtggcagagacgatgcgaggagttaaaggcatgcagcttagcaaagccacgcagagcaggcacactggaggcagaacagctgggtgggtcattggcttgtggggctctgggcaaattcataagtcagactgagcctcagtttcctagatagtaaaatcagctctctttggaggctatgttattcattctttcaacagatatttactgaatgcttactataggtctagcaccgttctgggtacagggatacagcaatgatcagaactggcacacacaaaaatccctgaccttctgaagctcccggggctccacatcacacaactccagcagtttccaccattcatgctaatattcttagtaaaaagcacccctggagtagaaagcattgtgaatggtgccccctggagttgtacgaggcaagaggccctgggagaggaagaccaaaaataagcacagtaagtatattatataatatcatacaaaatgtaaagtgctatgggaaaaaatattgcagggtaaggaacatcgggaatgagaggagctcttgaaaagatcaaagaaaaatgcaaagctaagcttagcacagtctctggtgcatagcaagcactcaataaacagtagcaactgttattacccttttatatcccccaacaacctaacaacataggtataagcaccactctttcacagacaaaggagcagaggctcagatatgggaagtgacttacccaaggtcaccagccttccaacccaggctcaaagtctcctgcattctacaagggagaccaaacccatttcatgtggaattaaggtagaataagattcattctgtaaaaactgagtcaagcactaaagagtcgctgatcactggaatttcatatgctaagattgtcactaatgtgtattggcccctgactgtcccctgagataaatgttcccaaatttctcaaaataggtatagtcttccatttgcctttttctgagtctataataaatgattctgtttggactcagaaatgaataggttatccatgctagtccatcaaggcttcctagaggacatggcagctgcagtgggcgtccccaggcaagtatggcaaagggagtgaggcggggcaggatgttctcctggagcacacagcatga

SEQ ID NO: 585 - DNA, 88389 bp, Homo sapiens
  source 1..88389: mol_type = genomic DNA
agcccaggagtttgaggttgcagtaagatatgatcacaccactgcagtccagcctgggcaacagagcgagaccctgtctcaaaaaaaaaaaaaaaaaaaaaaaaggtctggtgtagcagctcatgcctgtaatcccaatactttgagaggccaaggcaggaggattgcttgagtccaggagttcaaggacagcctaggcaacataatcaaaccctatctctatcaaaaatttaaagttttttgttgttgttgtttttgtttttttgttttgtttttgtttttgagacaaattgaggctctgtcacctaggatggagtgcaatggagcaatcttggttcactgcaaccttcgcttctcaggctcaagccttcctcccacttcagcctcccaagtagctgggaccacaggtgcatgcatgccaccacatctggcaaatttttgtatttttcatagagacagggtttcctcatgttggcctggctggtctcaaactcctgagctcagtgatttcccacctcagcctcctaaaatgttaggattacagatgtgagccactgcatccagccaaaattttaaaatttaaaaaaataatttaaaatctcctgtctccattaggatgtctctcacactacaccctcctttttttttttttaaatttttgagatggtgtcaaaaaatgacagcctctgtcattcaggctggagtgcagtggcgccaccataggtcactgcagcctcaaattcctgggctccagcgatcctcccacctcacctccctggtgccttttattttattttattttattttatttttgaccctaagtcttgctcttgtcgcccagtctggagtgcaatggtgcgatcttggctcactgcaactccgcctcccagattcaagcgattctcctgcctcagcctcccaagtagctgagtagttgggattacaggtgcctgcgaccacgcctggctaatttttgtatttttagtagagactgggtttcaccatgttggccaggctggtctcgaattcctggcctcaagtgatcctcccgcctcagtctcccaaagtgctgggattataggcgtgagccaccgcgcccagcccctggtgccttctttaacactgggtgggaagagagtgtcctggcgaggcctctgcacaccgactgcatttcccagatccaaactaataacctcccttgccccaggcgccttccagggctgacatgcctcctctcgcaagtgggggaaacagatgtccccgggggctggggataggggcgggggtgtggggaggtgaggggcgaggggaagggggggaggggggcgaagggggcggggaggagggggagccggccgggagacggcccggcccagccgcccgggctgttgcctccgctgcgggcgttcctccaggcctgcggagggcgctgcgggcgcggggctgggccgctctggctggcgggcgagcagagaggcgcctcggtggcggtgcgctgtccagcatttcagcaagcggcggcagcacccgcggggaggcagagggtgcggggccgtgggggccgcggagctgccctgcccaactcagcccagactaggcggcagcccggaccggcgggacccgagggcctggccccagcgcccggtagatcgcggcggtcagcggtgaggtgagagcgcctgtggggcgggggcatatccccgaggggctggggctgggtggaagctcgggcctccccagcacccccgtggtctgcaggctcccccgagcagaggggcagtgtgggaggtcggcgagggcgtctgtccgggggtgccaggcgcccggggagcagagatgaggaacattcatttcactgagagggatggagacagtggagacctttggggtcatgggcaggactcccctgggcataaatgaccatggcctagtccatgagggtgccagggaggccccccaaccgcagtcccactgaggagaaggacctgctccccagggaagggaggaccgatgcagtaaccctgtggagatgctggtcactggccctggtgaagggagcaggcccccacctggatgctgggcctctgtccagcaggaggtgccggcccaggggacagcctggcccctttcccggctacccaaatgcccctagggaggcaggagctggcaaggagaactgggtctcacaggatggcatttactcttgcactgggaagaggatggaggacacagaagagaaaatagctactaggaatttgggagggggttctctgtgcacaccccccaccccaaccacggacgcccagagagagtttctagcccagagttagacctgcgccagagtgaattcctggtaaagaagagagctgagaaaagacgcagcctctgccttgcctccgcctccccctccctcccagggctcctgcctggacagtgttgaagcctcctgcagttcctactcctgacagcagatccattgtggggagagatttagtgggaggaagggaaggttgtaccaaggtctgacgtggtacttcaatgcctgtgccctatcccagccataacttctcgctgtcctaagacctcactcaccctagcatcgggggcttgagctggtcttttgtcccatggcaagagaaaaggcaggtgctgggctttgacggagagacgtgcacaagttcctctgtccagggagcatcttaaggtcatggccccagtttgtgccagcttcttcctcagtcaaaaataggacccagctggctaggaaattgttcccacacagcagtagctttctggttccttaactttatgccccatcccactctcctgtggggtggaggaggtattcttgaagactgactaaagagtcaactgggttttaagaggtaggggtatgtgggttgggagtcatggactctgatgtcagaaagacatgggatcaaatctaggttatgtgacctcaggtaagccattgacctttctgagtctgttttcaatctgtaaaacaggtgtagtgttagcaatgtctactttgctgttgaaagaaataatctggataaggagatgggagactacttttacggtataaaatgctgggtgagtgttagtaaataggagacaagtaagaatttcttaaagaagagctggataaatgtggaatagtgttcagtgatatttgaagcacatttttctgttcccagaggagatgaacagtggttgagagcctcatgcccagctccatgctgggcacaatgcaacggttgactcagctaatcctcacagaagcttcatgaggaaggcatcattgtccctatttcatagctgagaaatgaagcttgagtgactttcccaaggtcatgaagccactcgcgctgtcctcctggaggcaggagagttactgatgacctgtcccatcctctgagtatcaaggcccagttcaatgccagtgtcttgatttatgatgccagctttacaggtggggagcctgaggcaggtgggtgagggcatacagtgcagtaaggaggtgactcccacaaggtcactgggatacttagaggtagaatgtgccttgaaccggccagcggggtgcctctaccccgtcacacctgccaaagggggggtctgggtctgacagtcccatctgctcactgctgcacccgttctgcacctcctctgcctcccaacctcttgctgacctctgccagccagtgactgctccttcctttcttagtggttcaccctcacctcctgagatggtccatggccaggagcagctactagcgctgctggggtcagcctcccttcctgacttttctccctcctctgcccatattttattgtcccccagggacaaaatcatagctcttcctgtctcagaagccttccaggggcaccaatggggaggttagagaagcccagcccctctttcttcactcctacacatacactgagcctctgcccatggtcctgtaacttcgtatacatgatctcatctcatcctcacataacctggacccaaaggtgctgctgtctccctttcacataggagaaaaacaaggcctgaaggtgtgatgggactttcccaaagtcacagagcaaggtcttggtgcaacccaaccccactgcctcaggaccccaggatgacttccacaacaccactctgcccccgattctccaggctccccagggcgagaatcaatccaggcactgtaggccagtgagtgttggagaggtgggtggcacatggtgaaggcaactgaaggactcttgaacatgagtccaaggaccttctttctggccctatctctgatcctggctccctgtatgaccttgaaggggtcccttcccacctcttggcctcagtgtccccaaccctaaaatgatggggtttaatgccaggtgcagtggctcacacttgtaatcctaacactttgggaggccaaggcaggaggatcccttgaggcctggagttcaagaccagcctgggcaacatagtgagaccccatctctacaaaaaattataaaaagaaagctattctcctctgaacatcgcttctcccagctcctttctcctcactcagcctcctgcccctcagtgagttccccctcttgatcccctctctcctcattgaaccctcccccatctctgatccgctcccctccgcaactccttcactgagccaaggtgttggaactgagaaggaaattcacctccatttcttgcagtccctcccattcagcctagactcatttccacactgacccagcgcctctgcagggcttgcctcctttctctctctctctctctctcttttgttttgttttcttttgagacagagtctctctctgtcacccaggctggagtgcagtggtgcaatctcagctcactgcaacctctgcctcctgggttcaaatgattctcctgcctcagcctcccaagtagctgggactacaggcatgtgccaccacacctggctaatttttatatttttagtagagatggggttttgtgatgttggccaagctgctctcaatctcctgacctcaggtgatccgcctgcctcagcctccccaagtgttaggattacaggcgtaagccaccacgcccagccatgcctcctctctttacaacaccagctgcaaactctcctattttccccaaaattccatgaataagcctcaatcacctcacctctgttgcttccctagtcccatgcctgtggtccttgggggcctcctgggctctggtgaacaaccctgagagggtgtggaaggcatcttcagtgtccctgcagctcacctcaaattctgggccagaaaggactctaaccttggttcagccaaagagtcctgggatctgtagatgggccactgggcctgtctaagccctattttccccctttaattaagacccaagtctgtaagtgacttgggacaggtgaatttgaaatctcagctccaataaatcaaagcttgaaacactggaggtgacttcaacctctaatgatggaactgcaggcttcctgacatacagatttataggacagagatatgtttaaatcttgggactgacagggccttcgtgggtggggggtcatctggtcaaaacccattttttaaatttttttgagagaggggctcaatctgttgctcaggctggagtgcagtggcacaatcacggctcactgcagccttgacctcctggaatctagtgatcctcccgcctcagcctcccgaatagctaggactgcaggcatgtaccaccacaccaagcaattattattatttcttttagagatggggtctcactatgttgcttcagcttccaaaagtgctagaatgtggcgtgagccaccacatccatgcaagaacagcttttgatgaatggagaagagtcggatgaggggaagggaagggaaggtgtttggggggcagagtgagggagagtgggttcagagaggagaaagggattggagagagagagagagagagcaggaggagtgggatgcccaggagaacagaggggattatgacagggaagggcttgttaccaaaaattacagacccagcctggcccagcctaggccttcactgtggcttagcacctgctgatacctctggggtgctgtccctctgccctcttctgggtcatgagcgcaggagggcgacatctccatcctggaggctcagccctgttggccccatgtcatctagaatagggctctcagagggcctgggtgggtgagccgggttcaggctgcctcactgactgttagcctagaagacaggcccctggggccatgtgtacattggctccagagcagtcctcgccccccaaggactccttcagagcctaaagcctctggcctgtccttctgcagcgctgcttcctcggcagccagcctggcctcagcctcctgccgcccccgccctggcctcctgcccactgcagaggctgctgtgccggcggaagctgacggacggtgccacggctcccttagcatcctgccagggcctctgagggctgtgaggaggcctgacccatttactcagaccccagggtccaggcgacttcctcagctgagccccctcctagtccagcactccctccccaccaccatttcccaggacttcccaggacagagacaggtaaaagcaagttgtacagaatcgttctgattgtaagaatggcgtatcttcagcctaggcggcatagcaagacctcggctcactaaaaaaaaataaaaataaaaaattagccatgtgtggtggcacgtgcctgtagtcccagctacttgggaggctgaggtgggaggactgcttgagtctaggacttcaaggatctagtgaactataattgcacaactacactccagcctgggcgacagagtgggactccatctcaaaagaagaaaacacagagaaagagagagagagagagaatggcatatcttcattgtacaagtcttgggaaatacagaaaccaaggagaaaatagaaactatcagtagttccaccacccaaagacaaccactttgaacacagtatggtatttccttgcaggcttttttccatgtgtccgtaggtacatagagttaaataaccaggaacatgctgctggaggaggtctgttgctgtttttactctatcatgagcattctctgatgtctttaaagactctttagggccaggtttggtggctcaccctgtaatcccagcactttgggaagccaaggcaggaggatcgcttgagcccagcagtttgagaccagcctgggaaacagtgaaaccccatctctaccaataaataaataaataaataaataaatattagccagacttggtggtgcacgcatgtagccccagctactcaggaggctgaggtgggaggatcgcttgagctcaggagttcaaggctgcagtgagctgagatcgcaccactgcactccagcctgagcaacagagcgggggactctgtctcagtaaagaaagaaataaatattcttccaaaagcatatttttaatggccttataaaggctgggcatgggtggagctgagagcagcagagagagtctctcccttgcccctgccctgtccctcttgggtggcacagctttggggtctgcgtgtgtggatttcccctggtgaaaataactttatggcctgggataggtcagacagaaagtaaggcaagcccctctgccagggattgaggtaaggatttgccagaactgctagggaaggaggacatgagagcatcacatatccctggcggggtgggcttagggggcggtgagggcttggatccaacaagaccccagaagaaagcacccagaactggaatctggtggctcccaatctcttgagccctgatttccgctggcctccaacctccaaccctttttctcttctgtaaaatggatataatgatacttgcctccagatgatactagaagtgactcaggtcctgggttggaaagcaccccggagccaggtatggtggctcatgcctgtaatcccagaactttgggaggctgaggtgggaggatcacttgagcccaggagttgaagaccaatctgggcaacataataagaccctatctctacaaaaaaaaaaagaagaagaagaagaaagaaagaaaaagaaaaaattaagccaggcacggtggctcacgcctgtaatcccagcagtttgggaggctgaggtgggcagatcacttgaaatcaggagttcgagaccagcctggccatcatggagaaaccccatctccactaaaaatacaaaaattagccaggcctggtggagggtgactgtaatcccagctactcaggaggctgaggcacgagaatcacttgaatccgggaggtggaaattgcagtgagctgagatcacgccactgcactccagcctgagtgagtgtagagcaagaagaccctgaaaaaaaaaagaaagaaaaaagaaagaagaaaggaaggaagggaggaagggaggaagggagggagggagggagagagggagaaaggaaggaaggaagaaagaaaaagaaaacattagccgagcatggtggtgtgcacctgtagacccagctactcaggaggctgaggcaagaggatcacttgagcccagaaagtcaaggctgcaacgagctatgattgcaccactatactccagcctgggtgacagagcaagatcctgtctccaaaaaagcaccccaggaagggtaaaatccagtgcacttctgctaggtggaggtcaccctttgagggggttagactatacaatcgacatttaatgagggcctcctgttttctgggcacagcacgaggcccgaggacacagaggtgaatcagactctgcctctgaccttgaggagcttctggaccagtggaaaggaaggcagtcatgaaaactgatgatccactgaggttctgctagaactaagtcgtccaaagtgatatggagcatcagaggaggcttctgggagaggtgacatttcagttgggcctcaaagaatgacaggggaggtgccagacagagagggcagaggattggcactccagagagcatcatgggcaatggcacagaggtatgaaacctcctggctggattcaagggatagttacctaatgtggtcataggacaggacagagggcagggctgataataggcagcccagtgggagtggttggccttgaagagttggaattttttttttttttttttttgatacagggtctcaccatctgctaggctggagtgcaatagtgagatcatagctcactgcagcctccaactcctgggctcaagatattctcttgcctcagccttccaagtggctgggacgacaggcatgtgccaccacacccaactaattttttaatgtttttttagagatggggttttgctatgttgcccaggctggtctcaaatgcctggcctcaagcaatcctcccatctcgggctctcaaagtgctgagattacaggcatgagccgctgcacccagtcaagagctggaaatttattcagaaagcaatgacaattataagctctggagcaatgccatcaaatgctcaggtttgcacttcaggaaggcccctctgcctgcaatagggtaggaggcagagagggaaaggaagagacctagagcagagaggtcagggaggtgtctgtctgcctattcatgtgggcaggaggtgatggtaccactgaaagggggtacaggataccagagacatgcctctgggagctgggcaacctgccccctacaccaatctccagctgatggcacagcccttggtatcagacagagcaccccaggttagaggagtgggcttcaagactggcagaacctccaagccaccccttctctcatcagggccccagagggggcttctggggaggcaggaaagctggaacattcagtgggtccttcctgggggaagtcctgtcttccctctctgtcaggccctatctgacacatatgtcattctccccagaaacctctctcttccctgcctctcaaatgctgtcttcttctctctcctgctcctcagacatcagaaagcagagatcgtccttgattcattcattcattcatcacacagcagtagctcttccccacttaaaagctgcatgaacacattgtcatccccaagccctgtgctaggcattaggtaaagagaggagaagcaggagttgggcacggtggcacacacctgtggtcctagatacttgggaggctgggacatgaggattgcttgagtccaggagtcttgggggggcgggtagtgcactatgatcacacctgtaaatagcccctgcactccagcctgggcaacatagtgagatcccgtctctaaaaaaatgggaggagcaggacagtccttgagccccagcagccctggataattttttttttttgagatggagtctcacactgttgcccaggctggagtgcagtggggcaatctccgctcactgcaacctctgcctcccaggttcaagcgattctcctgcctcagcctcccgagtagctgggaccacaggcacctgccactacacccggctaattttttttgtgtgtgtgtatttttagtagagacagggtttcaacatattgggtaggctggtctcgaactcctgaccttgtaatctgcccacctcagcctcccaaagtgctgggattacaggcgtgagccactgcgcccagccaagaatgttttttagatggactaggggttatgtagcagcattccaagggctaccgggacaccggtgtggggaaggactccctgacctggttgactttggttaacttttgagccggcctcacagatggagctcgtagaatgaatgcaggtttgccaggcagaggcacaaggaggcagggtgattttggcaggagcagagaggaggaggtaagagcaccaggtgcttggggaacagcatggctggagtgccagggtccgggcggaggagcgaaagcccgggttggagacaggggcctcactgttggggggcggggggggaattattgccaggtgaggcagcctagccttttttccgtagacagcagagaacgccaggaatgttcccagtaggtaagtgcatggccagagctgttccaggaaggtcaccctgaagagcggttttgatttggacagatggagacaacagggggcctgcggtgtgttttcaggacataggtcatatggcctggggcctttcctctcctctctgcggctcagcccaatctggacacccagaaccgctgcagccatggtccctaggtgcagaggtacctgccccagtatttctagaacagtccatgagaagcagattcccaggacccacccaaaacgactgattccaaatctgagtgtggggcctgaattttattattattactattactactattattattattattattattattattattattattattagagactaggtctcactctcttgtccaggctggagtgcagtggcgcaatcacggctcactgcagcttccaccttctaggctcaagcaatgctcctgcctcggcctcctgagtagctggcactacaggcacatgccaccgtgcccagataattttttaaaatgttttttgtagagacagagtctctacaaaactcagcctgttgcccaggctggtcttgaactcctggcctcaagtgattctcccaccttgacctcccaaagtgctgggattacaactgtgagccactgcacccagctgaggtctgcttttttttttttttttttgacagggtctcaaactgttactcgggttggagtgcagtggcacaatcgtggcttactagagtcttgacctcccccagctcagatgatcttcccaagtagctgggaccacaggtgcacgccaccatgcctggctaattttgctaattttgtattttttttaaagacagtgttttgctatgttgcccaggctagtcttgaactcctggcctcaactgatcctcccacctcggcctcccaaagtgctgggattaccggcatgagtcactgcacccagcaaggtctgctttttttttttttttttttttttagatggagtgttgctctgttgcccaggctggagtgcagtggtgcaatctctgctcactgcaacctccgcctcccaggttcaagcgattctcctgcctcagcctcccaagtagctgggattacaggcacccgccaccatgcccggctaatttttgtgtttttagtagagacagggttttgccatgttggccaggttgttctcaaactcctggcctcaagtgatcctcccaccttggcctcccaaagtgcagggattacaggcgtgagccactgcgcctggccaaggtctgcattttttaaagttccaaggtggaccgtacacactagagttgagaaccggtgcctcatcactttgcacatgtggttcccttcgcctggaatgcccttcctccctcttcctctacctccctgagcttcaggctctgctcagacatcttctgcgtgatgtcctgttccaatctgggtgccctcgagggcccggtgctgcttcttccctggcccactttacaccccattcctttttttttttttttttttttttgagacggagtctcactctgtcgcccaggctggagtgcaatggcgtgatctcagctcactacaacctccacctctcaggttcaagcaattctcctgcctcagcctccctagtagctgggattacaggggactgccaccacgcccagctaattttttgaatttttagtagaaacggggtttcactatgttggccaggctggtctcgaactcctgacctcaggcaatccacccgcctcagcctcccacagtgctaggattacaggcgtgagccaccgtgcccggctttacaccccattcacactggtggtttacctttccaactcatttggtattttctgtgtgccggcactgctgcgtgtattaacttatttagtcctcacaacatccaatgatgtaggtcggtcctagttggggaaatggaggcacggagaggtaaataacatcgcccagctaagaagtggttgacccacagaggttgcaccaaggtactgtgaggcccagggtggctgttctttaagggcagggacctcgtgggattcattgttgcaggttgtcagtgcaagcatggggcctggcatctaggaggtactcggtttcctcatctgtaggatgggctgaaggatgggaattctctctcagggtttctctgtagcttggggacttgaaaggggttatgagctctaaggtgcttggtgtggatgggaagtggtggcagaggctcctctctgggtttttggtttttttgtttgtttgtttgttttttaacaggattttgctctgtcacccaagctggaatgcagtggcacaatcatagctcactgcagcctcgaactcccaggcttaagcgatcctcctgcctcagcctcccaagtagctgggactacaggtgcatgtcaccatgcctggctaatttttttttcttaatttttagtagagatgggggggtctcaccatgtagcccaggctggtcttgaactcctggactaagtgatccttccacctcagcctcccaaagtgttgggattacaggcgtgaaccactgcgcccaaccctctctgggattttagggtggaatagtttcccagacaggaggccttttccctcctccaccatgctgtggttcaccctgtcccacagaaatcagcccctttgagcctggcctggggctgggtaccctgatggagattctcggatgatggcagagcagagtggagacttggagaggccactgctgcaccaggagctcccactcccgatccgacattaaggggctcacctgttcccagggcaaggaagacctcccttcagcacccctgccattcctacctcccacccaccatccctcaggagccgtgggttgttgtcaatgatgttgtaaattagctgcttaattaactatttaggctaatcagattaattgacattaattggttaccatttgtcaaggaccttgaaaagctgtgctcctcagagttgaagtgtgtgactggtgccgggcaggggagtcggggaggagctgtcaccatgctaacagctgggagtgtgcaggtggcaggcagtggcagttccaaggccaccaggaccgctgctcagggactgtgcacctcctggcacctctcagggagccccaacttctgagttctggcccctcacaccttgggaaacacatcaactcttcctctcccttagttgtttaaggaaaggtttggcagggaccagtgggaagactgagaaactttcctttttgtaaaaagaaaaaaaaaatagagatggggtcttgttatgttgcccaggctggtctagaactcttgatcttaagtgatcctcttacctcagcctctcaaagttctgggattacagacatgagccactgtgcccagctgggagactttccttcctccatccccaagggctgtaaagacctcagagggagagagatcttaaaattctaaataagtcatgaaataagtaggtcaccacataacaactgctaggatgacgtgcatatattcactcaaaaaaaaaaaaaaaaacaggaaagatgagcagtatagggtagataaaatatgcaaaatattaaactgtgataaaatgatcagatttgcattatttagtcaattacagcccccaaaacccacagtacatttttatgcctgttttaaagcacaactaacagttttaaattatagcacttgaaacaacaacaaaaaaaactactatgaaatgcatcctacgttttgggaagagagaaaaaaaaagccaacccactgaaaaatgggagtgtgcatttgtctttagagacattctctgaagattaaatggctcccatatttagtccaatactgggctgggagttaggagcccgcagttttttttttttttttttttttttttagacagggtctggctctgttgcccagaatggagtgcagtagtgtaatcatagcttactacagcctcaaccttctaggcccaaatgatcctcccacctcagcctcccgagtagctgggactacaggcgtgcactactacactggctaatttttttattattattattttgtgtagagtcagggtcttgctatgttgcccagtctggtttttttttttttttttttgagacagagtttcactcttgtcgcccaggctggagtgcaatggcatgatctcagctcactgcaacctctgcctcccaggttcaaatgttctcctgtctcagcctcctgagtggctggaacaacaggcatgtgccaccacacctggctaattttttttttttttttttttttgagacagagtctcactctgtcgcccaggctggagtgcagtggtgcgatcttggctcactgcaagctccgcctcccgggttcatgccagtctcctgcctcagcctccccagtagctgggactacaggtgcccaccaccacgcccagctaattttttttttttttttgtatttttagtagagacggggtttcaccgtgttagtcaggatggtctcgatctcctgacctcgtgatctgcccaccttggcctcccaaagtgctgggattacaggcgtgagccaccgcgcccggcccacatctggctaattttttgtcattttagtagagatggggattcaccatgttggccaggctggtcgtgaacttctgacctcaggtgatcccccagcctcgacctcccaaagtgttgggattacaggcatgagccaccatgcctgcccccatgctggtcttgaactcctgggtgcaagcagtcttcccacctcggcctcccaaagtgctgggattacaggcgtgagccaccgtgcctgcccccaggctggtcttgaactgggttcaagcagtcttcccaccttggcttcacaaagtgctgggattacatgcatgagccactgagcctggacagggagcctgcagtcttatcttgacttttccactgagtccttgagggtcccttccttctctgagccttgatttcttcaatggcgagtccctggcctgtcttcctgagagaatgcttacatggagcagaggaggaatggatttccagtacactggaggtgcatacaaatgtgaggagagagaagaggttcattttggtgggagggtcaggctctcaacatggacaggggaattgctttctggggaggagaggttcccaggttggtgacagaggtttctagcttgggaggggatgacatggagagtgaatgtggggtctctccctctctccccttttactgtccaattctgcagcccctcgggggaggaaagaccgggagagactggaggctgttgcctagcaacgagaggcgcatctggatcgatgggaaagtcagtgatgctccagcccccagcccgactctctctttgatctcagccggcccagcagaaacctgaggggatgccccccaggcagccagcttgattggagctgagtcaatagagggaatgttccataatgagattgtatgggcagtggaggcagctgcctgtggcttctcctgtcaccctcctcagcaggtggaaggggccggactgtctgtccagcacacacccttcctgctgatagctctggcctgggtaggggtagggtaggggtacacatcaccatccaattttgattcttgttagtcttgcacttccagggactcagagcccagctccccctgttaggttttgaagggaaggcgaggattatagaaagacacacacacagaaagagcacggctcaaaagcaaatgcagcttttgttttgttttgttttttgagatgaagttttgctcttgtcccccaggctggagtgcaatggtgtaatctctgcccactgcaacctccttcccccaagttcaagcgattctcctgcctcaacttcccgagtagctggaattacaggcgtctgccaccacacccggctaagttttgtatttttagtagagactgagtttccccatattggccaggctgttctcaaattgctgacctcaggtgatccacccacctcggcctcccaatcacgctgggattacaggcgtgagccatcacacctgggcgcaaatgcaggttttacgtccagcataaaaccttcagaagtgggggaccaacctaatgtcagagcccaccactgcttacaggctggcacaatttataggtatgggcaggaggggtctaggcagtatggcttgcccagcaggatattgataagatgtcccaataatgaggcagttctggcccttgttccagcagaatgtggtactccttgcattttctcccagcagaatatcgtaagaggaaggctgtttcttcagtcgggcctttgtccaccttgtggtcaggtggttaggtaggatgtttctcacgacccgaaccactgtgaagtgtttcactttgactaaggtctgcaaaatagcagggagcttacaaaatggtgcagtttagactaacactacccaagccctgccagtatccaggcccctgacacttggtccagataagagaaactgaggctcagaaaggaaaagggatctggttatacaacttctagcccatcgtgccttcctctgcctagctcccaggtgtgagcctggagcgggggttgggatctgatcctgggggaaggagaaggaggtgatgaaaactgggtaaagcacacaggcttctccgatttcactgcagggtcagtcctcaaggccagcttgggagggtcctcagagagcatgggcttctgacacacaggtggctctccctccatatctccaccaaggccatctgatttgcaccctcccgggacacagagaccgccacctgccatcggtgacagctcagtcataagactgttctttcttgggctaagctgaagctgcttctgtagaacattctccccaccctccaccccacccccatctccattcttgctcagcagccccagggaagctgtctgctcttggtggcaaggcttcagcctcccacaaggccactgagggccctgacagagagcaggaagactgagtaaggcagggattcttttgttcctctagaatgcaggggagaagagaccaaaccactacttgcttatttcatatcagttctggcctctacagatctgtctactaggttgaactcgtctgtgttgctttcttttcttttttttttttttttttttttttggcaaggtctcactctgttgcccaggctggattgcagtggtgaaatctcggctcactacaacctctgcttcccgggttcaagagattctcctgcctcagcttcccaagtagctgggactataggcatgcaccatcacacctggcctttttgtttgtttgttttttgtttttttcagacagagtgtcgctcttgttgcccaggctggggtgcagcggcgtgatcttggctcattgccacttctgcctcccaggttcaagcaattctcctgcctcagcctcccaagtagctgggattacaggcaccagccaccatgcctggctaatttttgtatttttagtagagatggccatgttggctaggctggtcttgaactcctggcctcaagtgatccacctgcctcagcctcccaaagtgttgggattacaggcgtgagccaccatacccggcctgtattgctttcagtagccagtgttgcttgttctgataccttccagctgtctgtcatgctggtgtgcagtgtccccactgtcctctgttgatcagtcggtctgagctcctggcttggctgggtctgtcccatttacaaggctctgtatgacctgtcctgggctacatcaatctgcactgatctcacctgagcattgttacctgttctcacctgggctgcattacctgtactgtggactcctctggaggcagcagacagtggaggcctccttgtccctccttgtcccttgtcagtgatgctccagcccccagccggctttctctttgatctcagccagcccagcagaagcctgaggggatgccctgggcagcctgcttggttgccacccaaatctttgctccaggaacccaaatcagagccaacaaagacaggagccttgaccagagaagtccttcctatctattcaaagacagggctggggccgggtgcggtggctcacacctgtcatctcagcactctgggaagccaaggtgggtggatcacttgaggtcaggagtttgagaccagcctggccaacatagtgaaaccccgtctctactaaaagtacaaaaaattagccaggcatggtggcacacgcctgtaatcccagctacttgggtggctaaggcatgagaatggctggaacccaggaggtggaggttgcagtgagccgagatcacaccactgcactccagcctggacaacacagcgagatactgtctcaaaaacaaacaaacaaacaaacaaagacaaggctggactcgagggcttacaaagtagatgaccatgaggcccatgcaaatgtcagcatgcacatagtctaggcatagtgagagcagtgaccaaggacctctccctctgtagttcccagagatgatggtggtaaaacaataagtagtgagctcccatcggtgcaaacacaggcggggtctcagcaaacagtcccaggtggctgctctgtgccaagccctgtgctgagcactagggatacagatgtggattggcccagtctctgcccttggacagccctcagtcagccaaggagcaacagtcatgctagattgcgagtagtagccacagggtgacagcagaggcacgtcccccagggagtccttccaggcagtcagggaaggcttcacggaggaggtgatgcttgagcagtcttgcaggaagggtagatgaggaagaaccttccaggcatgaggaacagcatgggtcagtgcattcttgggtggagtggaatgtggtgtggagctggacagggatagcgtaggactgggcacattgccagctaagccaccagggctttctcctgtggtctgcaggctcgccctctctgcctcaccggccccggacaccccatcttggccctggaaactttgccagcccagccacctccattgcccagcacagactgagacggcagggaaagggtcagcccgagtcctgcccaggcatggctggacccagccctagactgaaaaggggagggcagaagagggaccacaagggctatggtcaaaacacagagctgcagtgcccgcacccttgcaagccaggctgcctgcccctccaggaaccagccctcccacccccagccagccccagccttggggctctggccaagattttcctccagctccagcaggggcagcaggaagctccagctgctgaattattgaaagcaaggctttcagcagttcccctccccccaccgcgtcttctggagggttgggtaacaaacagccgtgccagcaccagcgcctctccagagagactccaaggagtcatggaggaagctcactgggctctgcccgctccctgagccacctcctcccaggcctctccctgcagtgtcttcttacccgtcttttttttttttttttttccagacaaggtctcactttgttgcccaggctggagtgcagtggcgcaatctcagttcaccgcaacctccgcctcctgggtacaagcgattctcctgcctcagcctcccaagtagctgggttcacaggtgcccgccaccacacccagttaatttttgtatttttagtaaaagagttttgccatgttggccaggctggtctcgaactcctgacctcaggtgatccacccgcctcagcctcccaaattgctgggattacaggtttgagccactgggcctgccctcctctttttttttttttttttttttgagacggagtctcgctctgtcgcccaggctggagtgcagtggcatgatctcagctcactgcaagctctgcctcccaggttcacaccattctcctgcctcagcctccctactagctgggactacaggcgcccaccaccacgcccagctaatttttcatatttttagtagagacggggtttcaccgtattagccagaatggtctcgatttcctgaccttgtgatccacccgcctcggccccccaaagtgctgggattacaggcgtgagccaccgcgccccgcacctgccctcttcttacccgtctctactggtctctactggtctgtgtgggtttgtatctgtgaaaagtaccatgattgggctatgagtgtttgtaatgatttaaaatggtaattattgacctgatctgttctgatttatatggatctatatttcctcctggtctaactcatgcctgtaatggtttagactgattggcatagttcatggctgataacagctaacacttaatgcatagagcttatcgcctacccaggcactgtacacacgttattcctttactccttaccctgaggtgcgggtacttatattaaccccattttacagataagaaagaggttaagtcactacgcacacatagtaagtgatttgaacccatctgctactggctgatcggcacgggtctgtcttggttcatgtggactgggttatcagttatcctttaagggcctgagggcatcaggttgcaagagagagttgagcacagtggctcacacctgcaatcccagagctttgggaggccaaggcaggagggttgcttgagtccaggagttagagacaaactagtgagaccctgtctctacaaaacttctaaaaactagctggacatggttgtatgcacctgtgtgtagtagtggccagctacttgggaggctgaggtgggaggatcacttgagcccaagaggtagaggctgcagtgagccataattgtaccactacactccagcctgggtgataggagaccccgtctcaaaaaaaaaaaaaaaaaaaagttgcaagagagatctttccaaaatgcaaatctgacctccccagctcaatacccttcactggctccctattgcctgcagggtgtggtcctaggtcctcagcctgagtctgaaggccctggggacctggccctccctcccctcctggcttagtgggctcagcaagacaagcccatgttttgttttgtttttttaatttttttaattttttgagatggagtctccctctgtctctcaggctggagtgcagtggcgtgatcttgactcactgaaacctctgcctcctgggttcaagcaatcctcctgcctcagcctcccaagtagctgggattacaggcacccgccaccatgcctggctaatttttgtatttttagtggagacaggccaggctgaccaggctggtctcgaactcctgacctccaatgattctcctggctcagcctcccaaagtgctggaattacaggattgagccaccgcgcccagcttcaagtccatgcttttccctctttcctctccatgccttcttcctgctcacccccacaccctgaccaggacatccttctcctcctcctttgtcccgccaactcctacttatgcttcaagatctctcctccagggagacctcctagctatgctcctctcctgacgcaccccagctgttagatgtctctgccatgcatccatcatccccagcatgataagcaccagtgcttctccttctgcatttctctcgtgtcctctggtgaaccccagagtagccactcacaaatagctgtgacctgaatgaatgacccaaccctgaagttgatggggtgtctcttggtcctctggtccttacccccccagccccacgctcttgggcagtgagcacaggggaagctttcaatataaagtgttcaaggctggaggtctgcagaagggtccttacacagggaagggaagggtcagcaggagagtgctccagggaatatgtccctgtcatggctgcacctggcttcaatgccaggatttggagtggggacacacctagattccttggacatgatgcagatggcttttcttttccagcttgataaagtatcttgacaaacgattgttgcacacacttatttttaacaagacccagaatgagtttcacaacttaaggacctggtttcatgggtatttatcagttctgtctcgtttctgacagttggaaagaatctttttcctcaggaggcacatccttgcccacctgctgtcaccacactgggctttttctctggaaggtctcatcctgcgtttgcagccaccaccttcacaggaatgcagtttcctggatcataaattccattccactgtagccctcttagccaagggtccctggatcttaacatgcccttggcttttgccttcccttcccttcccttcccttcccttcccttcccttcccttcccttcccttcccttcccttcccttccctccccaccccttccctcccctcccccaacttgcccccctccccctctcccttctcttcccttccctcttttttttttgacagagcatcccctcccctccccccaattccccctcccctgcccccacttcccctctcccctgcccccacttcccctctctccctctcccttctcttcccttccctctttttttttttttttttttttgagacagagtcttggtctgtcccccaggatggagtgcagtgacacgatcacagctcactgcaagctccgctcctgggttcaagcgattcccctgccacagcctcctgagtagctgggagtacaggcgcacactgccagtcctggctaattttttgtattttagtagagaccgggtttcaccatgttgcccaggctggtctcaaactcctgagctcaggcaatctgcccaccttggcctcccaaaatgctaggattacaggcatgagccaccgcgcccggccaaagacacatctttcaaaggcacatgtctaacatcattctcttcatgaaaccttccctgaccatcctaggcaaaggtagagcctccctggtctcttttttgctcctgcaggactgggtgggtgggtgggagaatggcatcagaatctcttcataacaagcctgttaccgcaagaaaggatgaatgaatgatcccactaagctacaagctacaagactagggaatattgtctccgtcgaggtattgctcctcacaagagggtattagctacgagggtctgcccacagaccctgacccaaatgatgaataaaacgtacactgatacacagagattctgttttgccagtcctgctgagtgaccgcctacacaccaagagaggtttgtcactgtggccgccccgatcagctagggagactcacatttattcattaagattagttaacaaaagcttgagtcagcgccattagaggtaattgacattgaggacttcccgagtaaaaagcacacatcaaaggctcgtcttgagaccacatgagtaaacaagttaactagataacttccccacatcccgttatttactactctaatctatttaactgaaggtaatgggaccagcccaccttcgccccggtctattaccgaagtcatgtgaaaaccctcaggccttccgaaagggttttgtggctatcataactaatattttttccaccagcctgaccgaatcccaacactccattttacagatgaggaaactgaggctcggagaagtttaatgacttttcctgatcacccaggcagaagtagtggagccagaatttaagctaaagtcttctgactccaagtccttgtcctggtctaacactctttttcctggccccagtagaagacagcagaaagatcttagaagtaagaaggtggttaaattgtgtgaccacagacgaagtgctcaagtgcttacttgaagctgtgggaatctgtacctttgagcgtgtggaggctctgagtcctgacattacctctggggaggcatgcctctggctggcaaggccaggaaaaaaaagcccctagaggaacggtgctgcccccctccccgccccccccgcccctttccccggcaaaagaggcttctcagccccggcagcaaatggggccccctgaactggtgatgggggtgctgtccgtggtgctggaggactgcgacgctgccagagacaaggggagcagggaggagtttgctcactcctgtaatcccagtgctctgggaagccaaggcgggggatcacttgaggccaagagtttgagaccagcctgggcaacaacgtgagaccctgtctctacaataataataataataattaatctccagtgccttttacgagacattcattgcatactaggtactgtgagggcatttcccatgcattagtcctttacaacaaacctatgaggaagatgctattattaaatagtttcattttacaggcaaggaaactgagacccagagagttgaagtcacgtgccctaggtctctcagcttatgaattcccaaagatcactctcctgtctccctctcaaatcaggggtccccagggcagggctgggcctcttcccagactcatctgtggtccacttctcactacagcccattccctctcccccagacctgaccaggtcactacgatctgagcatcttctccctctgagccccagggtgagtgctgacctcattagctaagaggcctctgtgcctgtcagcagctgactttccgaaacaggctggaccctgcagtacagatgagctgtttcaccttcaattaatcacttgcaggtagcagcatccagtttgtggcccactgtgtccacacccaggcttgctcaggaaacccaggcttgggcttgtgggagggaggcaactccagggacccagccaggaggctgggaaatcaggcctctaggcttttaaccacttcctggcttgtagaagaaggagtgtgcccctttggcaagcattaaactagggcttcatgacttaatctacacatgggtttggctggctccagcatctgggcttgcccttgggagctgacccagtgctggggacagcctcagttgaactctaagggtggccggtggggccccggctcctggctgtatcagcagaaaggaagtgggctgaaggtctggtgttatttatttatttatttatttatttatttattttattttttgagatggagttttgctcttgttcctcaggctggagtacaacggtgtgatctcagctcactgcaacctccgcctcctgagttcaagcaattcttctgcctcagcctcccaagtagctgggattacaggcatgtgccaccacacccagctcatttttgtatttttagtagagacaggatttcaccatgttggtcaagctggtctcaaactcctggcctcaggtgatccacctgcttcggcctcccaaagtgctgagattacaggcataagccaccacacccagcctggtgccacacacttagagttagtattacccagacttccagagtaggaaaggacccttggggtctttgagtcattgttcagtgggagaaacaagggtgcagagaggggaagggacttgttcatggtctcacagccaatcagtggtagggtaaagacttcccatgtgctgctctcagccaatcagtggtagggtaaagacttcccatgtgctgctctcagccaatcagtggtagggtaaagacttcccatgtgctgctctcagccaatcagtggtagggtaaagacttcccatgtgctgctctcagccaatcagtggtagggtaaagacttcccatgtgctgctctgcctccaaagaagtacagtgtcaatgcccccaaagaccagaacaagttagagttagggttcagattatagctctagactccatatctgcctgcttgcccctgcaaacccctcaccctcaagcacctccaatttgttctccgtgttccccatcacaataaatggctgcaccatccacctggtcacccaggccagagacccggtgtcatctaagctgcctcccccatcccacatccagtcaattacaaaccctgccagattggcccatttatttcttgaatcctggttgtcctcactggctctggcagccctgcctcctgctccctcccagccttgctgggaagcctgccttgacgaaccaagcagggctacagacacttctccagttctcttttatcacactatgctgctgtttacctgtcagtctcctgaaccagcctgtgagcttctacagggccatgatggggtcatgttcatctctatacccacagcctttaataacgtgaggccaagagtagatgttgggtgagtgtttgttgagtgaatgcttgaatatcgtttctatctcatgtttgaacaattcctgtaatagggacctcattcatcctacgacaaactgcttagttttgttttttgtttttctgtttgttttttgagacgaaatctcactctgtcacccaggctgaagtgcagtggcgcaaactcaggtcactgcaacctccacctcctgggttcaagctattctcatgcctcatcttcccaagtagctgggattataggcacgcaccaccacattcagctaatttttgtatttttagtagagacagtgtctgactatattggctaggctggtctcgaattcctgacctcaagtgatccacccgcctctgcctcccaaagtgctgggattacaggtgcaagccaccacacctgggcagaactgcttcatttttaaagagttttgattattataaaataaaaacaaaacaagacaagactcttttttgaactgagctgaaatcaacactagatgacttgcctgtgagaatcttggggctctgttttgcagattggctagggccttgctcctcttagggaattctaaggaccagtagtattggtgttacttgttagaaatgcaaattctcaagccccactccagatctatcaaatcagaaactctgggggcgaagtcaacaatctgtgtcttgctgggcgcggtggctcaagcctgtaattccagcactttgggaggccgaggcgggtggatcatgaggtcagaagttcaagaccagtctggccaacatagtgaaaccctgtctctactaaaaatacaaaaagttagccgggtgtagtggtgtgcacctgtaatcccagctactcaggaggctaagaaaggagaatcatgtgaacctgagaggcggaggttgcagtgagctgagatcgcaccattgcactccagcccaggcaacagtgcgagacgccgtctcaaacaaaacaaaacaaaacaaatctgtgtcttaacaagtcttcctggtgattctgatgcccaataaaatttgaaaatggctatttctagaccactgcccacctccccctaatttgtggtccatacttgggctatatcaggagaacctgggggacgtgagcaatttcatccccagagactttttttttttttttgagacagagtctcactctgtcacccaggctggagtgcagtggcatgatctctgctcactgcaagctctgccccctgggttcacgccattctcctgcctcagcctccggagtagctgggacgacaggcacctgccactacacccggctaattttttgtatatttagtagagacagggtttcaccatgttagccaggatggtctcgatctcctgacctcgtgatccacctgccttgtcctcccaaaatgctgagattacaggcatgagccaccgcgcccagccgagactttgattcagtagatctgggttggattccaggtagaactgacatatgaaatataggacactcagttaaatttgaatttcagataaacaacggataatttcttagtaggattatgttccaaatataaaattcaaatttaatttaactgggtatcctgtgttcctatttggcaaatctggcaatgctagctaaacatcactacttctaacaagcctctcagtcgattcagccaggtttgacctaaatcctctacaatccttcatatatttgaagctaggcattctgaccacctgtatattcttataatcttccccctccttggcaccctatttttgttgatatatcctaagataacatgcatttttggcatccacattgtgatattgactcaaattgagtctgtgatcattgaaaatccctataatccttcccaaatattctgcttctgaactatgtctaccccattccaattttagtttgggacccagcttcagaatgtggcacttttcactatcctgtttcactttcttcttcttcttcttttttttttttttttttttgagacggagtctcgctcaattgcccaggctggagtgcagtggtgcgatctcggctcactgcaatctctgcctcccaggttcaagtgattcttctgcctcagcctcccgaatagcttagattgcaggcatgcaccaccatgactggctaatttttgtacttttagtagagacggggtttcaccatgttggccaggctggtctcgaactcctgacctcatgatctgcccacctcagcctcccaaagtgctgggattacagatgtgagccactgcacctggccctgtttcaccttcttagattcttccaatgtctccggctactgagtccttttagattctgactgtatatccatgagccctctcaggctgtgtcctcagtgaatttgattgtcagactaccagtgttctatccagtcaatagtgaacatattggatcagatgtggtgagaatagagccctgtgattctccactaaatacctacatctaacatgacattgatccattaaccagctccttttgagtataggtcaatcaatcaaccaattacaacaaaatgggatattagcacccaccaggacagtgtcaccttatgaaatctcacagtgaggccaggcgcagtgactcatgcccgtaatcccaacactttgggaggccgaagcaggaagatcacttgagcccaggagcttgagagcagcctgggcaacatagcaagatcccatctctacaaaaaaaaattaaaaatcgtctgggcatggtggtgcacctgtagtttcatctacttggaggctgaatcaggaagatcactgaagcccaggaggtcaaggctgcagtgagctatagtcacgccactgcactccagcctgggcaacagattgagagtcaggaagggaagggaagggaagggaacagaagggaagggagaaaggtaaggtaaggaagggaaggaaggaaggaaggaagaataaatctcacaataatttcttttacttactttttttttttttttcaagacagagtctcactctgtcgcccaggctgaaatacaatggcacaatctcagctcactgcaacctctgcctcccaggttcaagcgattctcgtgcctcagcctgctgagtagctgggattacaggcgcccaccatcatgcctggctaatttttgtatttttagtagagacggggtttcaccatgttgcccaggctggtcttgaactcctgacctcaggtgatccactcacctcagcttcccaaagtgctgggattacaggtgtgagccactgcgcccagcctcacaatgatttcataaaatataatgtcacatggctcacagagggaccctgtgcgtgcagtcctgcagtcaccccctggtctgctggcccagcaaacctgacttggaaggaaatgggcttagtgtgcaatgatttgggtcattctattaatgacctgctgcagattcccacctggtgcctctccaactcaccaggtgaaattggtcaaatccaccatctgttctagtgaaaatccagactgcatctgccacgcccctcttcacatagctctcctttcctcctcaatcatttctgcaacgattaccctgggcaacctagcattgctacccaggcgttctcctagcactggggctagattttctcagggtttggagatctgagtgcattcagaacgactctcaccagctttccgcctctgccctccaggagctcaggccaagttctaggctggggagccttgcccaggtcagagggaagatgtgcggaacagcatggctcccagggctctcacccgcgccttcgcgctctctccacaccttcagcgcgcctcttgcattgcctggtgctggggtaggctctaacgagccagaatgaaaggacggttccctcccctaaaagggctcacagtttagaataggagttacaagcaaacagccaactgaatctcggtatctaaatatcgcatttaaaaagtgtggacaaaagatgcggaagcacaaagaaggaatgactcatccttcctggaagagcggaagattcccagaggaggtgatttttgggctgggccctgagggatgagttgaagttccctaggtgaagaaaaggggaaacaggactccagcggaggggaaacacataggcaaaggcacaaaggaggaagtaagggcatgcatttgggggatgaggaccaaggctaagaggctgggtgttggttgcaggatggggtgcagcatgggatgaagttgcaagatagcattcgacagaatgcaaaggggtcttgcaggccgtatcaaggaccatgccatgtattcctctctcttgcctcctgttgtcacgtctttgttcagccccgggcgcattgagcttcacatgcactaggcgcttagctggagctaggagttgaaagctaagctgccctcagcccagggggagccagacctttgaacccacagcaacaacagcgagaactctgggaggtaaggccaggagtggtggctcatgcctgtaatcccagcactttgggagggcagatcgcctgaggtcaggagttcaagaccagcctggccacgaggagggcagatcacttgaggtcagagttcaagaccagcctgggcaacatggtgaaaccccatttctactaaaaatacaaaaattagccgggcaaggtggcaggcgcctgtaatcccagctactcaggaggctgaggcgggagaatcacttgaacccaggaggtggaggttgcagtgagtcaagattgcaccactgcactccagcctgggtgacagagtgagactccttctccaaaaaaaaaaagagctctgggagggtgacaccagccagaggggaaaggaaggcttccggaaggtgataatgcctatgagcggtgactttgaggacaactaggaatgaagagtatcccaggaaagggcctggagccaagagaggtagaggaggatgtgtgtggtgcggagtggtggagacggggctggaccaggaggcagggccatgttacggctttaagccaaggtaacaagagtcacgggaggctgctaaccagggcatgacatggtctaatttgctcctggacccgtctgccaagttgccaatggaggatgaaggtctgggagcagggaggccaggcaaccacagagaggcagtggacctgcatggagggaggagcttgggtccacgtggtaacaggggaggagaggaagtggataaatgtgagcgatgttgagaagaagggatggggctgggcgcggtggctcacgcctgtaatctcagtactttgggaggccaaagtggaaggattgtttgaagccaggaattcaagaccaccctgggcaaaataacaagaacgtgactctacaaaaaaaaattctttgttttaattagctgggtatggtggcacatgcctgtagttccagctactggggagactgaggtgggaggatatcgcttgagctcaggagttcaaggctgcagtgagctatgactgtgccactgcactccagcctgggtgatagagtgagaccctgtctcaaaaaatgaacaaagaagaagggatgagggacccaacttgatgacaggtgaactgttgtgggtcaggtcaataggggtctccaagctccacacatgtccctggctcagatgaccaacagatagaggggtcacccatgagccaagcactgcagccgaggtgggtggggagcagggcacccggagctctgtttggggcatggtgggtgattcttgtggagtgtcctgggaaaacccctggtggaactggggtatagggctggtctcgggacagaggcgggaagccagcaggtgtgggagtggaaaagaggggttagaagaacagctttggtctctgagtccccaggcactcccctctccagaagactctggcagatgctcccaggaacaggtggaaatcagaggctcagagaggggtagtgacatcttcagggtcacacagcaaggagtggagaagcgcagcctagaacccatgcacttgggactcagggggaaggacatatgagaagagcttatgttttcatcaccgctgttgcctcctgtcactctgtccccttcagagcctcctgtagctgtcacagtccctctctcttctctgccttccagtttctgtggctctgaacactcccacccccatcccatcactctgaggccagagaggggagggtgtgttgggggagaagtgtcacagggaaggcccgatccaagatgtccaggcatacccaatcccttcttttcctccctccctccttcctttccctccctcccaccccactccctgggaatgaggcctccctgttgcttagcaactagcagatccttggagaaaggaaatggaaatagctcaagaggtgcctcccctctgttaagatagaagtccttggagtgtgtgtgtgtgtgtgtgtgtgtgtgtgtctgctctactttggagggcctagcatggagtcagggattcttagctccaagccaagttgactcccaccccaccccgagcctacaggaggacgtggctgcctggaaagctaatgtcagtgtcagctttggtcacgtcatcagaagcagtgtttccagaacaaaggaggggatagtcttgtgggcccaatctgggtgagccccgcttatctggaatgttggctttggagaagttggccagatcaaacagagagctaaaatctgcctctggggtgggaatagagtaggcttccatcttcccctctctgtagggctgccctgggagcagactgggaggtaggaacacatgtaatctgtgtgccactggacagagccaggatagtgggcctggtgtgtgcgtaaacagtttcaactgagcctaaaggagaaatatgactggggagttaatgatgtgtgcaagcgggcgctgggatgtctggcccaagcattcgtgcaagccagagaggatggtcctcggtagttcctggaggtgacacgattcccagccaatggctcttagaggccatccagtctggcctgcatccacccaccttacagatggaaaaagcccagtgtccaacccactcgtgccctgaggtgtgacccaaaggtgcaaaccagccgtccgcttccctctgcaccaggaaaggaagcggattagagccatgagtgtgcccttaaatctccaggattaactccagcagagaggagcttaacaggtggcgaagaagtgaccatcccgcctcgtgtctgtgtctgtccctcagggccagcggcccaggccagcggctccagggccagccacgatgtcctccaccgtgaacaacggggcggccagcatgcagtccacacccgacgccgcgaacggcttcccgcagcccagctcctcctcggggacctggccgcgggcggaagaggagctgcgcgccgcggagccgggcctggtgaagcgcgcgcaccgcgagatcctggaccacgagcgcaagcggcgggtggagctcaagtgcatggagctgcaggagatgatggaggagcaggggtgagcaggccgcggggcgggactggggtggggagataggcggggcgagggtgggagaagcgagtgatgctgcacgtgggcgtggcgaacgtcgtgggcggggagaagggcggggctaggggctattagggcggagtcgggcgactgtgggaacccaagagccttgtccagacaagaagccagagttcagaccagttggggtgaagccatggcaagtccagctcatctttcatttatgtattaggttgttgcaaaagtaatcacggtttttgccattacctttaatggcaaagtgatggctcacacctgtgattccagcactttgaaaggccgaggcgagcggattatttgaggtcaggaattcgagatcagcctgcctaacatggtgaaaccccgtctctatgaaaaatacaaaaaaaaatttagctgggcgcggtgtcttacacctgtaatcccagaactttggggggcctaggcaggtggatcacctgaggtcaggagtttgagatcagcctggccaacatggtgaaaatccgtctctactaaaaatacaaaaattagccaggcgtggtgacgcgtgcctgtaatcccagctactcgggaagctgaggcaggagaatttcttgaacccaggaggcggaggttgcagtgagccgagatccggccactgcactccagcctgggcaacagatcgagattctgtctcaaaaaaaaaaaaaaaaaaaaaaaaaggccgggcgcggtggctcacgcctgtaatctcagcactttgggaggccgaggcgggtggatcacaaggttgggaattcgagaccagcctgaccaacatggagaaaccccgtctttactgaaaatacaaaattagcctggcgtagtggcacatgcctgtaatcccagctacttgggagactgaagcaggagaatcgcttgaaccgggaggtggaggttgcagtgagctgagatcgagacattgcactccagcctgggcaacaagagcaaaactccgtctcaaaaaaaaaaaaaaagaaaagaaagaaagaaactagtgggctggctgctgaaggggtcaaagtcaggagcagggactgcccatcagacttgcactgtcagtgagctgagaaatcggaaattccctacacggggtgggggggcggggagctggagcctggagccacatggggccagacacagcctgtgtccttcagtccttccaagccacacctttgtccaccccaggcctcctgggctcccttagacaggggccaccatctctgaggagcttaggaagacccccaggcttaggcagagacagcgagttgctgaaggccatccggaaggcggggggccaaggcggagccaggatcaagagccctgctggctgccaggcaaggctgcttgtagggagaagaaggggtaatggggacctgatgctcacctcacccagaggaccaggtagcggggaggaggccccttgcagagagggatggatggatggatggcaggatgctgaggacacacacaaaggaggttccagctggcaagggaacatgttgatgagctgtgggtaccggaagagggaatgagatctcaaggggcaggggcaaggaggggcgaggtggggagcatctcctacagtgagaacctcaggtcgtgaattaaaccggcaaatccagccagattcggtggctcacggctgtaccagctcacgtggctcccggcactttgggaggccgaagtgggcagatcgcttgaggtcaggagatcgagaccagccttgccaacatggtgaaaccccatctctactagtaatacaaaaaaatttaaaaggccaggtgcggtggctcacgcctgcaatcacagcactatgggaggacaaggcgggcagatcgtgaggtcaggagatcgagatcatcctggcaaacacagtgaaaccccatcgctactaaaaatacaaaaaattagccgggcatggtggcatgcacctctagtcccagctgctcaggaggctgaggcaggagaatcgcttgaacccggaggcggaggttgcactgagctgagattgtgccactgcactccagcctgggtgacagagcaagactccgtctcaaaataaaaataaaaataaattagccaggcatggtgacgagcgcctgtagtcccagctactcgggaggctgaagcaggagaatcgcttgaacccgcgaagcagaggttgcagtgagccaagattgcgccactgcacttcagcctgagcaacggagggagactccatctcaaaacaaaacaaaaacaaacacacaaacaaaacctgcaaattctgcgaaattctgtctggagagtcaaggagggaggggagtgtgggcagaggacaagagggttgacagggacagacaaggtgttccctgcactttcctgctcctcctcctcccagaactccacctccttgatgaacccatccccatcctcagcccctctcccttcactaagtcccctcctcttctctgtactttcccatcctgaaagccctccccctcaaagaccttcaccctttcaaggaaccttccctcactgagcccctccccaagcaaaaggtgatggcatttggccacgtcctgggtgtaagacccccagcatcaaggatccttgcttccctgggaagcacccactatgtccccacttgctcagtcagggtcccttcccccacccaagctctcacttgaggtggtccttatcctggagccacctctgaaaaaccagctcttgaatggccctccccctgccctccccatcctcagcagggcatttgatcatggcagggacaggcattctgagactcccaaatccaggcttccagccctatcttgaccttgaacaagccacggtttactcacctggaaaataggggcacctgtgttctggagctgttctgagagtcctccgttgaagacacacatgggactgcccagcccccagccagtcctcacaaagtgccagcaaacaccaggcacccctgctcttttatcaaatcgagtcattaatatccatttctagaaacactggttcagtcccgtttatttaccgggttctcgggcatttgacaaatattcacatcagtcacaggaacacacactctttggcctcattaaaaagcaatccttttccttaatattgatggctggctggctaatccactggtgattgatggcgtacttggagtcaccttcccagacagccttggcttgcagtctgcaatcaccgcggggcgggacggagcctccagcctttctgacgagatgctcccaccccagcccccagcatcctccctgccaccctgtttatcttcttgccatgcctcttttttagtttgtttgtttcgtttgagatggattctcgctgtgtcacccaggctggagtgcagtggcatgttctctgctcactgcaacctctgcctcctgggttcaagtgattctcctgcctcagcctcctgagtagatgggattacaggcacatgccaccacacctggctaatttttgtactttttagtagagacggggtttcaccatgttggccaggctggtcttgaactcctgacctcaagtaagccacctgccttagcctcccaaaatgctgggattacaggcatgagccaccatgcccagacgccatgcctcttcttgtaaggacttgggtgaggcgacagagcacagctccatccctagctagtcttggagctttgtttgtttttcccttaggcggagtttcactcttgttgcccaggctggagtgaaatggcacgatctcggcttactgcaacctccacctcccaggttcaagccattctcctgcctcagccttccgagtagctgggactataggagcacgccaccacacccagctaattctttgtatttttagtagaaacggggtttcaccatgttggccaggctggtctcgaactcctgacctcagatgatccacccacctcggcctcccaaagtgctgggattacaggtgtgaaccaccgcacccagcctaggcttggagttttgagccctccctcccctctccctgttctgtttgctcatctataaaatgggaatcaaaaggctaccattccagccgctgtggctcatgcctataatcccagcactctgggaggctgaggagggagcacttgagcccaggagtttgagaccagcatggcaacatagtgagccccctgccaatccacctacaaaaaaaaatttttttaactagccaggtgtggtggcacatgcctgtggtcccagctactcagaaggctgaggtgagaggattacttaagcctgagaagtcgaggctgcagcgagctatgattgcaccactgcactccagactgggtggcagagcaagaccccatctaaaaacaaaaaacaaaaacaaaaacaaaaacaaaacaaaacaaaaggtcactgtctggcctaatgtaggaattcatgcctgtaatcccagtactttggcaggccaaggcagaaggttttcttaaggccaggaggcctgggcaacatagggagaccctgtctgtaccaaaagataaaaaattgctgggcgtggtggctcatgcctgtaatcccagcactttgggaggccaaggtaggtggatcacctgaggtcaggagttcgagaccagcctggccaacatgatgaaaccccatctctactaaaaatacaaaacaattagccaggtgtggtggtggacgcctgtaattccagctactcaggaggctgaggcaggagaatcgcttgaacccaggaggtggagattgtagtgagctgagatcacgccattgcaatccagcctgggcaacaagagtgaaactctgtctcaaataataataacaataataataataataataattagctggtcatagtggcacactcctgtaatcccagcactttgggaggctgacgtgagagaattgcttgaggccaagagtttgagaccagcctgtgtaacatagcaagactccatttctacttttaaaaattaaaaataggccgggtgcattggctcatgcctgtaatcccagcactttgggaggccgaggcgagcagatcacgaggtcaggagatcgaggccatcctggctaacacggtgaaaccccttctctactaataatacaaaaaattagccgggtgtggtggcaggtgcctgtagtcccagctactcaggaggctgaggcagcagaatggcgtgaacccgggaggcggagcttgcagtgagccgagattgcgccactgcactccagcctgggcaacagagcgagactccatctcaaaaaaaaaaaaaaaaaacatttttcactctgaggaactcttaaaattcagtgtcccctcaccctactcctgtcccagagagcgacccaggaaatccccaaagccacaatgcatttggcatgcccttcccttatggcccatagagtggcatgaggactaagggagccagactggctgggggaacacgtgggccaagaggctggggaccctgggacagacatcactgccccctattcccccttccccacccacacacaagcccttgacgttgtttttttggttttttgtttttttcaagacagagtctccctctgtcacccaggctggagtgcaatggcgccatcttggctcactgcaacctccgcctcccaggttcaagcgattcgtcctgcctcagcctgccaagtagctgggattacaggtgtatgccaccatgcccagctaattttgtatttttagtagagatggggtttcaccatgttggccaggctggtctcaaactcctgacctcaagtgatctgcccgcctcggcctcccaaagtactgagattgcaggcataagccactgtgcccggcctagaaacccttgactttgagtttgaagctttggccatgctagccagccttcctgcatggccctaggctggccggctctgccacctccacagggagcaagtggtttgggtagcagcctccccctttatcccagcctttgcctcctggcagaacagacagagaagaggcccaggcaattctcggagctggtgccatgccaacctggcaggggtctcagatggaaaagggcagggagcctgggatgactgtacactctgtccccactgctctgggacagataagcttcagttgctactatttatttatttacttatttatttatttttgagacagagtctcactccattgcccaggctggagtgcaatggcgcaatctcagctcactgcaacctctgtctcctgggttcaagtgattctcctgccttggcctcccgagtagctgggactacaggcacgcaccaccacgcccagctgatttctgtatttttagcagacacaaggttttatcatgtttgccaggctggggtcaaactcctgacttcaagtgatccacccaccttggcctcccaaagtgctgggattacaggcatgagccactgtgtctggccagttgctaccattcattgagcacctactatatgccaggcactgtgcaaagtgatgtaaatacatcacgtctgtgttagcccactttgcattgctctaaaggaaaacttgaggctaggtaacttataaagaaaataagtttacttggctcacggttctagaggcttgtacagaagcatggcgctggcatccaattggcttctggtgaggcctcaggaagcttttagtcatgatggaaaagaaggggagccagcatgtctcacatggcaccagagggagaaagagggagaggagagacaccccagactccttaaaacaatcagctctttcctaaactaatagagcagcagtctccgaccttttcagcaccagataccagttttgtggaagaaaatttttctggctgggcgaggtggctcacgcctgtaatcccagcactttgggaggctgaggtgggtggatcacctgaggtcgggagttcgagaccagcctgaccaacatggagaaactccatttctagtaaaaatacaaaaattagctgggcgtgggggcgcatgcctgtagtcccagctgcttgggaggctgaggcaggagaatcgcttgaaccggggagatggaggttgtggtgagccgagattgcacctttgcactccagcctgagcaacaggaatgaaactctgtttcccaaaaaaaaaagaaaatttttccatggactaggcggggtggtggggggatggtttcaggatgattcaagcacattgcatttattgtgcactttatttctattattattagactgtattatgtaatgaaataattctacaactcaccatcatgtagagtccgtgggagccctgagcttgttttcctgcagctagacagtcccatctggggtgatgggagacagtgacagatcatcaggcattagattctcacaaggagcgtgcaacctacatccctcgcatgcgcagttcacaacagggttcccactcctatgagaatctaatgccaccactgatctgataggaggtggagctcaggtggtaatgggagtgatagggagcagctataaatacaggtgaagctttgcccccttgcctgctcctcacctcctgctgtgcagcctggttcctaataggccacagagtggtaccccaacctgaggtatcagcaacctctgtaatagagtgagaactcactcatggccatggggagggcaccaagccattcttgagggatccacccccatgacccaaacacctcccaccagaccccacctccaacactgaggatcacatttcaacatgagattgggaggggactaatatccagatgacaaccttgaaaggtgggtcctgttcccatttcacagattagaagctaaggctgggagaagcacatggacttgcccaaggccacagaactgggaagtgggaggtgccaggattcaaaagcaggactgttgggctcctctgtctctccccgtcatcactgtcccaagtggctcagctgagaagattgattccaagagataagaggggaaaggacactcagaggtggtggtcacatgagaccaatcaccaggtgtcatccttgtgtccccagcttctcccaacaagataccctggggcacagagggaccctccccaagcctctgagttggttcaatccagcagcccatcctcaacagacaggtgctggagttcatcaacttgcctccagcccactgactccaggacgacccccagccctgcatatatgccgctgcaggtctccctgaaacccatttgtgcccatttcccagccttccatgtgccaaagacccccaggaaagggggcttggatcctggcctgaaaccccctgccagccccccacaagcagctggggaatggcccaccctcacccttaggccatctcttcccacccacctggcccagggtcccatgccagtctctgtctccctctgtggggcctataaattaggggctaagcagtgttggagggcctgtgctgtgtttgtctctgtgctggtgacagtgacaagctagtctctgcaagagaaggtgatgtgggagcaattgctctctgcctctgctgggggggtggggcaccaccctttcttcctgggtgccaggctctgcactgcccaactcacatgcccagacaagggacctccaggtgaatgcccgagtctgagggccacacagggactgaggtggacactgaggagccagggccctgaacttggtggagctaggttggtggcagcagtgcagggtggcctgagccacgaggggatggggggttagaagaaaagccccccacccctaaccaggccaggacccagccctccccacggtgagcgacacagcaggctgaacccacacagactccgaccctagctgggggtcaggggacacctgcttaagaagtaggtggtgaccaggcacagtggaacatgcctgtaatcccagcactttgggaggccgaggtgggtggatcatctgaggtcaggagtttgagaccagcctggccaacatggtgaaaccccatctctactaaaactacaaaaattagctgggcatggtggcggatgcctgtagtcccagctacccgggaagctaaggaggagaattgcttgaacctgggaggcagaggttgcagtgagccgagattgtgccactgcactctagcctgggcgacagagcaagactccatctcaaaaaaaaaaaaaaaaaaaagttgaagaagaagaagaagtaggtgatgcttcttacccaaccagacctcctgactcattcaattggtccccaagtcccatccctctgactcaaccgattggtccccaagccatctccctcctagagggctttttgtccatttctcgcccttcatcctcaagacctctctccctgctctggagtcactgtctcctcctgaacccctatggtagcgcaacaccagctttctgcctccagttctctcttctccagccatgaattcaccagagccattttttcaaaaggaaaatccagtcttcaaactctccatgcctctctatcaccagtcactcatttagcacacatttttggatgccacaatgtggcaggcatggggccaggtgctgggactgcctctgggaaccagacaaagcccctgccctcagggaactccaggccagcattggatacagaccagccaacagataattactggagcctgaaccacctgccaggagttgggatgtatgggttgctatggacatgcaaacgctagcattgaacctgcgatggggggaggcatccatcttactgtaaacatccaaggagtcaaatctttgccatgattatttccacagggtagacctgaaagttaatgtatgagtcaaagcatgtgttcattttttttaaaggcttttgaagataattgtcaaattgctgtcctgcaaatatttgttgaaggagcagagggaagcagggagtagagagatgggatctctgaaaggaaaaaacaaaacataccattttcgtggatggctgagtggggagggctggacccatgctgccaccatgtcttctttttaaatttttttaaaattattttttaaaacttcgctgggtccaaaaattttttaaaataattttttaaaaatttaatatacatagtagttatacatatttatagggtacatgagatgctttgatacaggcatgcaatgtgaaataagcacatcatggagaatatagtatccatcccctcaagcatttatcctttgagttacaaataatccaattacattaagttattcaaaaatatacaattattcactgtagtcaccctgttgggctatcaaacagtaggttttcttgttggttttttgtttgtttgtttgttttgttttgttgttttttgagacggagtctcgctctgtcacccaggctggagtgcaggggcgcaatctcagctcaccacaatctccacctcccgggttcaagcgattctcctgcctcggcctcgtgggtagctgggattacaggtgtgcaccaccacactcagctaatttttttatatttttggtacagacagggtttcaccatgttggccaggctggtctcgaactcctgacctcaggtgatctgcccacctcagcctcccaaagtgctgggattacagatgtgagccactgcacctggccagtaggtcttattcattctattttttgtatccattaatcatccctacctccccctcaccatgttctctgtcctagacaacgacctgcagcccagggagagcagagagaaaggtttgggacaaataagccttagtcattaccatttattgggcacctactctaagccaggcactgtgcaaagtgctataatgacatcacctccatgaatcctctgacaatcttgaaaggcaggttgtgttcccatttcacagatgtagaagctaaggctagaaaagttgtatagtggccgggtgcgttgtctcacgcctgtaatcccagcactttgggaggctgagctgggcagatcatctgaggtcaggagttcatgaccagcctggccaacatagtgaaaccccatctctactaaaaatacaaaaattagccaggcatggtggcaggctcctgtaatcccagctatttgggtggctgaggcaggagaatcacttgaacccgggaggtggaggttgcagtgagctgagatcgcaccactgcactccaggccaggcgacagaacgaaactccgtctcaaaaaataaaaattaaaaaaaagagagaaaagaaaagttgtataggtgtacacaagtgtatagaaatgttgagttgaaccaactcggaggcctagggagtgtccctccatgcccagggcatcttgctgggagaagctggggaccccgggatgacatctggctactggacaaagaggcctcaagtgtgaccaccacctctgagcatcccctgctctcatgtttttctaggtcaaccctcttagctgagccatgggggccagtgctgaaaaggagagccccaagagtgcagcagtcctgttttgaatcctggcacctcccatttcccagctctatgaggttgggcaagtcaattcactttgccttagcttctacatctgtgaaatgggaatgtgacctgcctttcgaagttgccagaggatcccttcagtaacagctgctggacacctgctgtatgccaggcacggggccagggctgcatgatcaaagacctccaggggcagtgtggacacaggctggagggagagactccagaggaactgggaggccaggtagtggctgtcacagaggagcagtgagagagaatgaccactgaccccagcagtgggagcagggataaggagtagataaccggactttggtccctaaactgagactgggcttagggtgggagagggaggggagtagagacgtcaggggcttccatttgaggcccagatatcagccaccccctaccccaagccagcagcagaaagaagcaatgaaactaccccttgccccccgataacccccctacaagccacttggcagccttacccttgcagaaatgggggtgctttgacgacctcccatggctatatgaggatgggatgtcatggaggccaggaaggcagaaaaggctgtgtatgtttcaaagccagaattctcactcttcccctaaaattctcgaaagagcgactgcagtctggatgtgggagggaggcctgccctggtgggtggaggagggtacggaggaggggctcagcctcacctgaggggcgagggggtcgtctctccccacctctgggaacaagtttttcttttgtctgtttgttggttatttggttggttgattgggctggtgtacaatgttttgttgctgttgtttgttttttgagatggagtctctgggtcacctaggctggtgtgcagtggcgtgatcttggcctactgcaacctctgcctcccaggttcaggtgattctcctacctcagcctcctgagtagcggggattgcaggcgcccaccaccacatccggctaatttttgtatttttagtagagacagggtttcgccatgttggccaggctggtttcgcactcctgagctcaggtgatctgcctgcctcggacacccaaagtgctgggattacaggcgagagccactgcgcctggccaggcttgtgtacagtgaacttgagcttcctcagtgctgaagacctggcttgatctgtgaccttggacaggttattgcaagccggagtgtgcacttgtgacccaggggttggcggggctgggctgagtgcggggcaggaaagagggaaccaaatctgggagaccagccccttcaccctctctgtgcccctgcaggtattcggaggaggagattcggcagaaagtggggacattccggcagatgctgatggagaaggagggagtgctcaccagggaggaccggcctgggggccacatgtgagtgcttacctgtgtggggatgagggagagggggtgcaggctcaggcagcagctgggtactaaaggggcctgtccaggtggcttggtctggttggggctcaggtgagggggtggagaggaagaagataaggagaaggagaggagagcatggtctctgcccactggaaatgctggcctggcccacggacatctggacatcaccaagggcctcctcctaccctccctgggtcctacctatggctcagcagtgggaggcatggggaaggcagcccagatctcagctcaggggattctgagctgcaaatcggaagacctcagatatgccctgaacccaacattgtctctggccgacaaagtgaccccaggcaagccctgatgattccctcctatagaaatgaaatttgggcagggtacagtggctcaagcctgtaatcccagcacttcgggaggccaagtcaggcagatcgcttgaggtcaggagttcgagaccagccttggccaacacgtcgaaaccctgtctctactaaaaatagaaaagttatccgggcatagtggcacatgcctgtaatcccagctacttgggaggctgaggcaggagaatcgcttgaacccggaaggcagaggttgcagtgagccgagatcctgccactgtactccagcctggtcaacagagcgagattccatctcaaaaaataaaatagaataaaatcaaataaaattcagagtaagcacacactctgggatgtaagagcccacacaccaaatcccactgctaccatgaccaatggcttggtggctaaagagggtgtaagactgggcatggtggctcacacctgtaatcctagtactttgggaggccaaggtgggaggattgcttgagctcaggagttcgagaccaccctgagcaacatggtgaaactcaatctctacaaaatacacaaaaattagccaggcatggtggcctgggcctgtaatcccagctactcagggagctgagacacgagaatcacttgaacctggaaggcggaggttgcagtgagccgcgccactgcactccagcctgggtgacagagcgagactctgtctcaaaaaaaaaaaaaagggtgtatggctttgctgaggtcacgcctctgccgcctgtcacaggataggaggcacaccggtttgccgtgggcctctgggtgggccttggatcaaacgggcaagttatagcaaggcaaatattgtctcagatcagaggcgaactgtgaaccactcaaaaccatacaaacactggaggaggctgcattatgagggtgggaacagcctgtgcctgggattgtccagccattgctggccgagctccatgcctggcaggcaccgtgtgctcagggagcgttgctgaatccactcagatgagccttccccttgttcaccctcagtttccccgcccagcaccaacatctgatgcttctctggctagaagtaaaattagctgggctatgtggtacatgcctgtaatctcagctacttgggaagctgaggcgggagaatcacttgaacccgcctcagaacagagtgagattctgtttcaaaaaataataataaaataataataataataaatcttagcctacatgcaggaatgggtaaaggtctcttaaacaaaaatggagttaattatattcattcatttgctgttccgctatcccagcagcaccttctgagtgattctcctgttgcaatcatctttatttatttatttatttatttatttttatttattttttgacacagggttttgctctgttgcccaggctggagtgcagtggcgtgctctcgggtcactgcaacctctgcctcccaggttcaagctattctcctgcctcagcctcctgagtagctgggactacaggtgcatgccaccatggcccagctaatttttgtttttttgttttgttttgttttgttttgtttgagacagagttttgctcttatcactcaggctggagtgcagtggtgtgatctcagctcactgcaacctctgccccccgggttcaagcaattctcctgcctcagcctcctgagtagctgggattgcaggcgcccaccatgacgccccgctaatttttttgtatttttagtagagatggggtttcgccacattggccaggctggtctcgaactcgtgacctcaggtgacccacccgcctcggcctcccaaagtgctgggattacaggcatgagccaccacacccagtcttagtcatcgtaaaggctggcagcactgtaggaacagacagacctcaataggaaacggggaaacccttcttgcagactttctgtattgctgggtagtgaggggtaaagtatttcccaccttaccccacttaatcctcatctctctggccagagtaggagcaaaacaggaacagagacaggctccagcctgggtgacgaagaaagactccatcaaataaataaataaataagactaatacatgtaaagtgctcatcgtacctggcacctgggtcagtaattatcataatatgcaccgtgtcatattgttgccccacagtctgagaagtgaaggaaaaagctcgagactggattcatctctgtttctatcatcactacccccacccagggcccctggcaggcctggcagcctggctgagtgatgagcagagagggtggaccctttgcctggactccccgccctcctcccacatctgggccctttcatctgtcagtgggccattgtgttcctggctaatgggaaacaggaccatttaattggcgaaagtgctggcatgaggaagagcgtgctgccggcagtctctacccagggcagagccctgcccatggcggtcagcccgacgcccgtcctctgtggggctgtgttccacttccacatgctctttgtccttttgtagcagactctgtctgggtccactttgatcagctctgtggggctcagtttgttttcacaagggggtaaaacttcccctgcctactccacagacatgatcaggagtaaactagttagcaaacatgaatttaaggctgggtacggtggatcacacctgtaatcccagcagcacttttttttttttttttgagacggagtctcgctctgtcacccaggctggagtgcagtggcgcaatctcggctcactgcaagctccgcctcccgggttcacgccattctcctgcctcagcctccccaacagctgggactacaggcgcacgctgccacgcccggctaattttttgtattttcagtagagacggggtttcacggtgttagccaggatggtcccgatctcctgaccttgtgatccgcctgccttggcctcccaaagtgctgggattacaggcgtgagccaccgcgcccggcccccagcagcactttggaaggctgaggtgggaggatcacttgagcccaggagttccagaccagcctgggcaacagagcaagacccccatctctatttaaaaaaaaaaatgctgggagctgtggttcatacctgtaatcccagcattttgggaggctgaggcggttggatcacttgaggtcaggagttcaagaccagcctggccaacacggtgaaacccccatctctactaaaaatacaaaaaattagctgagcatggtggcacacgcctgcaatcccagctactctggagctgggagctgaggtgggaaaatttcttgaacccaggaggtggagtttgcactgagccaagatcacgcaaccacactacagccttggcaacagaataaggctctgtctcaaaaaataaataaaaacaaaaataattgaaaaagaaaacatgaaaatttaagagcataaaacattaaacaaatttaggactcagagagcacacacccacaacagtatctatcgagtcggaaggggatgagtgagctggaagacctcatgctggcttacatctccagcagggaaggtcagccagcgcattcaagggctgtgtcatttgcacatgaattctcaaagccagttgctagatgaacttatataggtgtttgcttgtttgtttttgagacagagtctcactctgtcatccaggctggagtgcagctctatgatctctgctcactgtaacctacgcttcccgggttcaagtgattctcctgcgtcagcctcccaagtagctgggattataggcatgtgccaccatgcccagcgaatttttgtatttttagtagagatggggttttgccatgttggccaggctggtctcgaactcctgacctcaagtgatctgcccaccttggcccaaagtgctgagattacaggcgtgagccaccgggcctggcctcatgtaatttgatttgtagaaatgtgatcttactatgttgcccaggctgctctcaaactcccagtctcaagtgatcctctcaccttagactcaacgtatatgctttactaaaaggtcttgacatcatagggaatgttccttttcttctctgcacctcagttttctcatctgcaaaatggaaaggggtgcaatttctgtaaatcattaaggggctatgaatgggattgtgaactatgaagcactctttaaatattaaagaacaggccaggcgcggtggctcacgcctgtaatcccagcactttgggaggccaatgtgagtggatcacttgaggtcaggagttcaagaccagcctggccaacatggtgaaaccccgactctactaaaaatacaatagttagccgggcatggtggggggcacctgtaatcccagctactcaggaggctgaggcacaagaatggcttgaacccaggaggtggaagttgttgcagtgagccaaaatcatgccactgcattctagcctgggtgacagagcaagactccatctcaaataaatacataaataacattaaagaacactgttcttggccgggcacagtggctcacgcccgtaatcccagcactttgggaggccgaggtgggtggatcacctgagtttgggagtttgagaccagcctgaccaacatggagaaacctcatttctactaaaaatacaaaattaggctgggcacggtggctcaagcctgtaatcctagcactttgggaggctgaggcaggtggatcatgaggtcaggagttcgagaccatcctggctaacacggtgaaaccccgtctctactaaaaatacaaaaaattagctgggcgtggtggtgggcacctgtagtctccgctactcgggaagctgaggcaggagaatggcgtgaacccgggaggtggagcttgcagtgaaccgagatcgtgccactgcactccagcctgggtgacagagcgacactccgtctcaaaaaaattaaaaaaataaaataaaaataaaaataaaaatacaaaattaactgggcgtgttggcacaggcctgtcatcctagcttctcgggaggctgaggcaggagacggaggttgcagtgagccgagatcccgccagcctgggcaacaagagtgaaactctgtttcaaaaaaaaaaaaaaaaaaaaaaaggacattgttcttagtgacagtgtcatctaggagaagcaggataggagagtctaggattctaaccctgggagttcccacacagcacaaagccagtaaaggaagcctcagcccaggtccatgcttatccctgggactctcaggacaggttgtatcaggaggttccaagaccttgtgtctgctcctctaccctgtgctcatctttatttatttatttatttatttttgagatggagtctcactgtcacccaggctggagtgcagtgacacaatcacagctcattgctgccttgaactcctgggctcaagtagtcatcccaccaggactacaggcatgcaccaccacatccagctaatctacatgttttttgttttttgggttttttttttttgtacagacgggggtcttgctttcttgcccaggctggttttaaactcctgatctcaagtgatactcccacttaagcctcccaggttgctgggatgataggcatgggccactgtgcctggctgaactgggctgttttgagatggagtttcgctcttattgctcaggctggagtgcaacggcacgatcttggctcactgcaacctccgcctcccaggatcaagtgattctcctgcctcagcctcctgagtagctgggattacaagcatgtcctaccatacctggctaattttgtatttttagtagagatggggtttcaccatgttggtaaggcttgtctcgaactcctcacttcaaatgatccagttgcttcagcctcccaaagtgctgggattacaggcacgagccaccgcacccagcctgggctattttattttgtaaataaccttcatcatttttgtgtcagtatcaactgaagctccctgctcctaccagctcacccacacaatacgcaatgtgagcttaagttttgctaaagactatgttttatgtgtcaggcaggcacttttgcggctgaggacctgtgtaggggtaatgggccctggaaggatggggcttgatgagctgagggtgctgggaattttagggacaaggacaggaggcaggacgccactggcctcaggaagaggagcatggaaaagaaaagagaagtttaaacaaaggaatgtgggggtgtttggctctgtacaagctgggggatgacatgagcctctcctctgtcaccccagaaaaacctcgctacgtgctgtgtgacatcaaggcatcacccagcttgggaatcgggacttgtttgggaattgaatgaagttcttgagaatggcctcaaggctagctacccctgtcatatttgggtaacattatttttccttttctttctttctttctttctttctttttttttttttttttttgagatggaatctagctctttcacccaggctggagtgcagtggtgcgatcttggctcactgcaacctccgcctcctgggttcaagcgattctcctgcctcagcccctcaagaagctgggattacaggcatgtgccaccacacccagctaattttgtatttttagtagagacggggtttctccatgctggtcaggctggtctcgaactcccgacctcaggtgatccgcccgccttcgcctcccaaagtgctgggattataggcatgagccaccacgcccagctattttttcttaaagatggggtctcgctgtgtcactcaagctggagtgcagtggcatcatcatagctcactgcagcctcaaactcctgggctcaagccatcttctggccccagcctcccaggtagctgggactccacaggtgcatgccactgtgccctgctttttatttttatttttgtaaagacaggagtctcactatgttgagacctatgctggtctcaaattcctggcctcaagggatcctcccaccttggcctcccaatgtgttgggattacaggcatgagccatcacacccggcctggttacattttttaaaatacaaaatcaggcttcaaagagtcaattagtgggttccctaaaaaatctgtcttttaccctgtagctgtggcctgcctcccttccctctgtttcattttctgtgttgcagcgtcttttctccccggaagagatgttggtgtgtaagtagcagcaacggcccctctgtttaacggtggctacccctccccggatgacagtcacaggccaggcctcatagacagcattttactttcctcaaaggtggtctgttctttccctcgatgtatagatatgaccgagaacttagtcatgcctggattcaaacctgtctctgtgaatctgttacaggaaagggatttgatctaaaccccaagagagggttcttgaatctcactcaagaaagacttcagagggagtccacagtgcaaagcaaaagcaagtttattaagagagtaaaggaacgaaagaatggccactcaggcagggcacagtggctcatgtctgtaatcccagcactttgggaggccgaggcaggtagatcacctgaggtcaggagttcgagaccagcctgtccaacatggtgaaaccccgtctctactaaaaatacaaaaattggccgggcgtggtggcaggtgcctataatcccagctacttgggagaatgaggcaggagaatcgcttgaaccctggaggcggaggttgcagtgagccgagatcacgccactgcactccagcctgggcgacaagagcaagactctgtttaaaaaaaaaaaagaatggctacttcatagacagagcagccccgagggctgctggttgcccatttatattgttatttcttgatgatatgctaaacaaggggtggattattcgtgcctcccctttctagactacaaagggtaacttcctgacattgccatgtcactctcatcaccatcttggttttggtgggttttggccggcttctttttctttttttttttttttggagtttcatcctttttgcccaggctagagtgcaatggcatgatctcggctcactgcaacctccgcctcctgggttcaagcgattctcctgcctcagcctcccgagtagctaagattacaggtgtgcgccaccacgcctggctaattttgtgtttttagtagagacagggtttctccatgttgggtcaggctggtcttgaactcccgacctctggtgatccgcccgcctcagcctcccaaagtgctgggattacaggcgtgagccacccgccaggcccttggctggcttctttactgcaacctgttttatcagcgaggtctttatgacctgtattttgtgctgacctcctatctcatcctgcgactcagaatgcctaacctcctgggaatgcagaccagtaggtctcagcctcattttatacagctcctattcaagatggagttgctctggttcacatgcctctgacaaatccaaaactcatgttcttaatgctctgccgatccaagcccttttccctattgctgtaggaggggaaggggtgagccaggtggacagcacccagaagtaaggggagctctgctgaaaccagggctaagcctccatcttggtgggggagggcactgtctgagccagcttggataaaaaatggaaggtcggggccacccccctagagacaggtctctggagggtcacttccaggcttgttcaattaaaaaaaaaaaaaaaaaaaaaagaaggccaggcatggtggctcacacctataatcctagtactttgggaggccaaggcaagataatttcttgagcaatcctcctgggttgaggccaggaggtcaagaccagcctgggcaacatagtgagaccccatctctacaaaaaaagttttttttaattagttgggagtggtggtgtgctcctgtagtcccagctactctggaggctggagtgggaggatcgcttgaggccaggagttcaaggctgcagcgagctgtgatggcacaactgcactccagcctcgcgacagggtgagaccctgtctcaaaaaataaaataaaaaataaaaaataaactgcacagcacctatgacctcagcaaattctcccaacagccctggaatggagttatcactctcaccttcgagaagaggctcacagagggacacggcaggctccaggtcacaaggcggctcaggacagtgcaggatgagcccttgtctggagcttcaaatctcatgctcttgcctccagcccagctacctctagaaaaaaagaagcgctctgagaagagcctgtagggagccaacatctgtggcagaggctggctggggctgcgggagcagggacaggaggtgtctggtccctgctgagcgaaaaggagagttctgtaagatggatagggagtattggaggcccccaccctctgccaccaggcttgattgatgagcacagtcctgctgccagagatgagcagggggggcccctggaggctgcagaggggagggcgaggagaggctatgaatatttcagcgacagaggccgggctggaggaaaggaggggaagcggggcagggaggcactcagccagcgggagggggctcagggactaggacacccaggtgaggaaagacccacatcattgagccagggctcggggagggcggagataggccaggaggaaggggctctttaagaaattagagtttgccgggcgcggtggctcacgcctgtaatcccagcacgttgggaggccaaggtgggtggatcacaaggtcaggagttcaagaccagcctggccagcatggtgaaaccccgtctctactaaaaatacaaaaaattagctgggcgtggtggtgcatgcctgtagtcccagctactcgggaggctgaggcaggagaattgcttgaacccagcaggcggaggatgcagtgagctgagatcatgccactgcactccagcctagtcgacagagtgagactccatctcaaaaaaaaaaaaaaaaaaaagaaaaagaaaaagaaaaaaaaaaaaggaagaaattagagttcgccgtgcgcggtggctcacgcctgtaatcccagcactttgggaggccaaagctggcagatcatctgagatcgggagttccataccagcctgactaacatggagaaaccccatctctactaaaaatacaaaaattagcgggcacctgtaatcccagctactcgggaggctgaggcaggagaatcacttgaacccaggaagcggaggttgcagtgaggtgagattgcaggagactgcagcaggcagaggttgcagtgaggcgagatcgggcccctgcactccagccaggacaacggagtgagactgaaaaaaaaaagaaagaaaagaaaagagaaattagggttcagtgagagaaaggaggggtggggatggggttcccagaataggacagtagggttaggggcacagggatcaaatggggggttcactgagggggagggcttcaatgaatggggctaggatatggaggggattcagtgaagaagaggagcctcatctaaggagtagccacacacaccccacccacgactgcagggtggctcatgcctggaattccagcactttgagagatcaaacgggaggatcgcttgaggccaggagttcgaaaccagcctgagcaacatagtgagaccccgtctctgcaaaatttttcaaattagccagggtaggggtccacgcctgtagtcccagctactcaagaggctgaggaggaaggatcgcttgggcccagaagttcaaggctgcagtgagctatgatcccaccgctgcaacccagcctgagcaacagagcaagaccctatctccaaaattaaaaaaaaaaaaaagaggagggggcttactgagatggtgagaactcagaaggggtgcgggctaaataaggggctcggttatctccttcttttttgcaaaagattgtaccgtgaggtcggggacctgtaggggatgtgccccgttgggttccccaaatctctgcctagccctgtaaggccaggggccgcagttacccctcgcccctcccccagccgggtagcagcccgcagacttgcggggctaggtcaggccccctgcgccgagaaaaggggtgaagaaaagtcgtcccgagactggtggtgagcgtccctgtcgccggcagtgtggcggagaccccgcggctgaccgagggcgctgagccgggcctggagtacgcgccctttgacgatgacgacggcccagtggactgtgactgcccggcctcctgctaccgcggccaccgcgggtacaggtcagcggccgccgcggcgggggtggggggcgcgcggggctgccccccctcaccgcccccacccccgccccttctcccccaggaccaagcattggtctagcagctcggcatcgccccctcccaagaaaaagaagaaaaagaaaggcggccaccggagaagccggtgagaaccgcgcctgaccggagcgggaagggaggaggaggtggggtctctccccggatgcccgtccctggctcacaaccatgcagcatttgtgagccccgcccctctctgagcccctccctcgccctccccgtgccgtcccccgactaggtgccctccgggtaactgaacccaccccaggcctcaagctcctcccctcgctaggccccgcccctcgacaagcccctccccttcgctaggttccgccccccaaggagcccctccccttctctggggcccgcccctcaccgagcccctccccttctctaggacccgcccctcatcgaggtcctctccccactaggccccacccctcatcgagcccctccccttatctgggatccgcccctcactgagcccttctctagcacctgcctctcactgaatcccccagagccagactcactgaccgggcccgtgtgttaccagcacctgctcccagtccccctctgccctcccaggggtcccgtgcccaccaacactagtgcgagtggccctggggaggaggggcctcatctgccatccccgaatctctctgtccaccctcccctgtcctgcgtgagaccctggcaagtgtctggggccccaactaaccccatccatccgtctgtcctttcttcctggcatctgccctcagcaaaaagaggagactggagtccgaatgcaggtcagtggggacagagctggctggggccagggcgggggatgtctgtgggtgggagagattccaaggccatcccccagaggccggaggcctggaccctcagggcctgcacctggacactgccaaggtgcaagttttgcccctacagaggccgtgaatcccaccgttggagcctctgacttctgggtttgaaactatctttgcccacaatgccaggggggacattgttgtccccacaattgtggggacaacataggcagcgccatcaactaccctgagggaccttggcgacccttggggcctcgggtcactctgtacaagggaccttgggcttcctggcctggaattccctttccagcttcaatgtcccaagcacccaggtctctccagccatttccagccccccaccccccaccccagctcactagagcccacctccctgtgtccacagctgtgggagctcctcacccctccgcaagaagaagaagagtgtgaagaagcatcgccgagacaggtacccttgctgcccccaccctggggcctcctcttcctcccgtggggcccagggccagggctgtggccctccataggtctcccctgggccaccccaggcaggctcaagagaactcctttatcgccctacaggtctgattctgggtcccggaggaagagacggcacaggtgagcggcgctttgcagaggacatggtcagtggtcccttaaggaccaaagcccaaaggacgcaatgatgggagggggttttgagggtcccacagggctccatccttcagctccagggttccttcccacagccaggctgcggggacagggcagtggagaaggagcatgaaaaccaactgtttgcaacccttgcctgccccatgcatcagccatgacgtggtgaccccaagaatttctagacaacatggcaggtccaatgcccaaggggtgtgtctgtctgtggaggtgccagttagacaagcagaaacaccgagaccctgaatttgcagggaaacagctcgcgaggcaggaggacctctgtgagctgggagggctccatggataggaggcagggtcggggagctgtggctagaggtagagtttctcggggacaggtgctagcctcccaacaggtttgactgccaggttatggagccatcctccacccaggagggctgggggttagtgtgggggagctctgagcagggcagtggcttgttcagggtggactgggggaggggagaggaagtgaaaggcaggagtccaggtggaggcagagtggtgcaggagaagagggttgctgagaaagcagaaaacagcctgagccaggcacggtggctcacacctataatcccagcactgtgggaggctgaggcaggtggatcgcttgaggccaggagtttgacaccagcctggacaacatggtgaaatcctgtctctactgaaaatacgaaaattagctgggtgtggtggcaagcgcctgtaatcccagctactcgagaggctgaggcaggagaatcacttgaacccgggtggcggaggttgcagtgagccaagagattgcagtggagtgcacagcactccagcctgggtgacacagcgagactctgtctcagaaaaaaaaaaaaaaaaaaacaaagtctgggtgtggtggctcatgcctgtaatcccagcactttgggaggccgaggtggctggatcatttgaagtcaggactttgagaccagcttggccaacatagtcagtctctactgaaaatacaaaaattatctgggcatggtggcgggtgcctgtaatcccagctacttgggaggctgaggtaggagaatcgcttgatactgggaggaggaaattacagggagctgagatcgcaccactgcactccagtctgggcgacagagcaagactccatctcaaaaaaaagaaagaaagaaagaaagaaaagaaaaggaaaggaaaagaagggaaaagggaaaggagaggagaggagagctcggaaggaagttgtggggcagtcacattccagaggtggcatcagagccagacccccttccagcagcccagaggaagggcagagtctggagttccttctttgtagtgggaatttgccaagtaggggaggagcctacataaacacctaatcctgcccctccaatgtccccaatttttcatcttcccctggcctcccagtgtctatggatcagtgtgggtccctactgcccccaagtggccaccattagcttacacacaccctctggccagctcccatccttcctggacaggtcctaaaagtgaactaggaatagaccaacttccaatggggagactgaagcccaaagcaggctccagcacccaaacccatagcctccgggccttccccgcagtcactctgctcctgtgggagcacatttctgtgttccttagtatggctttgttttggggtcagaaggactgaagggatctggtggcaccagggaggatggggctgaggattggggttgggtgagacctttgagggctaaccagaagcttctcaggcctttcatcaaaggtagagggtgctgggttggggggcttgccccagagggctggatgggatgtgacaggaagctgtgggagttgggagggggcagccctgcagatggatccagagatgtcattcaaaagcagggagattggccaggcacggtggctcacatctgtaatcccagcactttggagggctgaggtgggcagatcacttgaggccaggagttcgagaccagcctggccaacatggtgaaatcctgtttctactaaaacaaacaaacaaacaaacaaaaaatagccagacgtggtggcaggctactgtaatcccagctacctgggaggctgaggcatgagaattgcttgaacctgcaaggtggaggttgcagtgagctgagattgtgccactgcacaccagcctgggcaacagagcgggactctgtctcaagacaaaaaaaaaaaaaaaaaaaaaaaaaaaagcagggacatcatgcccttgggaaagcatttctttcctaaacccctggtgagctggcctagggctgggccagtctgggagcacacggaggaagggggcacaggaggtatgattatcaggccacaccccaatactcaagggaatgagtattgggcatgtcccaagtccagtaccaaaagacaagagcaaatcaccatttctatctggcccagacctaaggcttgaggctgccacacctgcaaacagcaacccctgccttttttttttttttttttttcctgagacggagtttcactcttattgcccaggctggagtgcaaaggcgcgatctcagcttacgcaacctccgcctcccaggttcaagcgattctcttgcctcagcctccctagtagctgggattataggcacacaccaccacgcctggctaattttgtatttttagtagagactgggtttctccatgttggtcaggctggtctcaaactcctgacttcaagtgatccactggcctcagcctcccaaagtgctgagattaaaggtgtgagccaccatgcccggctatagcaccccactttatctggggccagccacacttctgtggccctcccagactgggcagcatttgcgacccagggaggtgttcacgggccaggacttccaggaggaggaaggccggagctttggctgagtgaaagggacaaaggggtggagtaggatggaaaagtccccgccagccatggggcttaggccctagagtggaacaaatctcagatccacacctgagtatacccaggctccagggcacgaaggccacaccctccccgggccacaccatcactgtggtctctgctctctgcagatctcgaagctccaagtgcaaaagaaaagagaagaacaaagagaagaagaggtaagcgccctccctactctccagccccccattcgttctccctcccgccccagcaaactacgccttttagaatcacagaatcaggccattaaaggtagctcattttgcccagatggaaaaattaagatctagaaagaaagccaagggctcttgctgagtcagagcttgaaccaaaacccaggcctcttgccttccaatccagggtcctcccaagcccagtcctcgtgactcccaccctccttcctcccaccccacaagtcccaggatcacctgctgagggctgaggggggtcttgggaggctggggttgtctagagaaaagggggccttttactaattctcacagatgacccatatggaccagataggctctgcagccagcaccaacactgctgatgtaccttttataggagactttaggggactgatgaacactggctttcagtagggttccactgggatcctggtgggaggctgggcaacttgggggctggggggatcacggggggcagaattgaggtacaggctgatttcccccatccacgccaggcctcacacagagtccccaggccggaggtctcatcgccatagcagtggcagctcccacagcccctccctctcctcccactacagtgattccagatctcccagcaggtaggcctgggcctctgggaggctttctcctggtgggggatgagggttgcagattaaacacccccaagggctggggagcagggctggtggacagaatgtcaattcatcggtgggtagaagtttatcaggggtagccaggtgtggtggctcactgctgtagtctcagcactttgggaggccaaggcagaaggatcgcttgaggccaggagttcgagaccagcctgggcaacatagacttccttctttaattaaaagtaataataataattattacttttattatatataattatatatatttaatatttatatatatttatatatttaatatttatatattttatatatttaataaatatttatatatatatatatatatatatatatatattttttttttttttttttttttttttttgagacggagtctcgctctgtcgcccaggctggagtgcagtggcgggatctcggctcactgcaagctccgcctcccgggttcacgctattctcctgcctcagcctcccaagtagctgggactacaggcgcccgccactacgcccggctaattttttgtatttttagtagagacggggtttcaccgttttagccgggatggtctcgatctcctgacctcgtgatccgcccgcctcggcctcccaaagtgctgggattacaggcgtgagccaccgcgcccggccttatttatatatttaatatatataaatatttatatatttaatatatataaatatttatatatttaatatatataaatatttatatatttaatatatttatatttaattatattatatatttatatatttaatataaatattaacatattttaatataaatattaatatatatttcaatataaatattaatgtatattttcatataaataatatatttaatatatttatatattttaatttatatatatttatatatctatatataaatatagatatatattttaatatttatatatattataaatatttatatattttatatatttatatatttaatatataaatatttatatattatatatttaatatataaatatttatatattaaatatataatatataaacatttatatattatatattttatatatttatatttaattatgttatatattaatatatatttaatatatttatatattatatatattattatatatatttatatatataatatatattttgagacgagtattgctgtgttgcccaggctggagagcagtggtgcaatcttggctcactacaacctccgcctccgggattcaagcaattctccagcctcagccacccgagtagctgagattacaggcgtgcaccaccatgcccgactaatttttgtatttttagcggagatgggatttcgccatttcgaacagcctggtctcgaattcctgacctcaagcgatccgcctgtctcggcctcccaaagtgctgggattacaggcgtgagccaccaagcccagcctaataataatttttaaaaagagaaatttaccaggggagtgataacttgaggaagagctgccctaaggcccctaagcctccgcctgaattggaaatcgaggcacagcctcgctggctcaccctggtcaagccctctctaagtggaaaggttcccagcatggtgaaaaggcaggtggagggctgctctctttccccgtgctggggaagggggaaagaggaggcgcaactgcttgcaaagcgggtgtcccacgccgactcccccattcttcctggcgcctaaccccaggctgagccccaagcaccgagacgaagggcgaaagacgggcagccagcggtccagcggaagccggtcgccttccccgtcgggcggcagcggatgggggtcgccccagcggaacggcggcagcgggcagcggagcggagcgcacgggggccgccccggctcggcgcacagcccgcccgatgtacgtacgcttcgctttgcggagggttcccgcgccgcgggctgcgccgtgcgtggtcgggcgggtcgccagcggggcagggggcgataagtgtggcatgggggcgggggcgggggcggccgcttcctccctcctcggctccccgctgggcgtcctggctcgggagccgccgggagtgctaggccgttgcgcccacctggccctggtgtcagggtgaggggcgcctgcggtcttgggccacccttgcgcttggcaaactgaaggccagaggggggttgaccgcggggcactgagttgggtacagggctggggaggaatcagggtctcgtgccctccccaggcatattagggtgggaggggcatggacattgataggagtcccaggcaggagcaggattcgagagacaggaccccccactgggcaccacctgggccctgagtctccctcttcccaccaagccctggccccacctctgagcacccccctccccctccctcaatcttctccccagcccctccctccctcagccccctcccccatctcagtccctctgccctctaaagtccctgctctgaggagactctgcccttttccaggcaccgcccacacttggactggtgtctcaaacctgccggctcctcttcccacggccaccctcctgaggcacctgccagcgtgcctcagagaccccacaccaacacccccaaaactgtccccacccttcctccaagaggggcacagatgcccgaagacctacaggcaggtgcaatgggggagctggcagaggagagagacgtctcagcctgtccccagatggatgggctgggcctgggttggggcttctcccagaccccagggaaggtccacatccccttctggtctgttgattatagagtacacagttgagacccctcagagagagggggctgcagtgctggcaggggcactggggtgggtgggggggtggcttggggtggggagacctgcaggttccttcccagacccgcagactgccccccacccaaccccaaagcctcagctgggagtgggagagctgcccctccccagacctcaggtctcagcagcaaacatgtacgtgttggtcagtttcattttgatttttggctgtttcctttcactccctttcttttctcaaacaccctttactcccacggcctcagagaggaaagtcaagggcagctgactgaaggctcttggtctcaaggttaagttttattgaaggacatttacctgtctctagactgtcccacctggaccaggcaccaggctcctgggctctgggggttttggttgggccgcgcagggaggatgacactgatgtccccggatctgtcttgggagggggttgagggcaggcagaggtagctgagggtagcatggcagaggctggagaggattaacaacccacaagaggggcacccaccatcccccacccctgtgggcatggagtcccaagagcacaggacccgaaacaccttcttgccagcttctcatccacccttctggggcctcccaagagacacagagatgcgggttctctgaagtcagggctggaagtgggtcccttcgtacctctggtcctctctccagccctggagtcctgagcaatgatcccacctccaccccctccccaatgcagacaaaatggccacagcatctaggcatccccaggatagggcagtcggggaaggggacccagccaccagccttggggcgggagcttctgaagcacccacatcttgtctccctcccagcatgggactctagtttggcacagccctgggagttttcttggagacggcattttgtgactcctttcaccaagcatggtccccaaatcctatccctcacccttggggccctgggagatctgggacttcagagcatcccgggtctcaaacctgcattcagatccctgcctctctgccttaaaaagacccctgaggagtcaaaagaggctagttcttgctcatatgcagaaaagtgagatgggggatgggagaggggtcccagactttaccatgaacgaaaccgtcttcgggaaaaaatactgggggtggtattcttggacgatacctttaaaaaaaaaaagaaaagaaaaaaagagagagagaaacaaatggaaaaaaaggaaagctcaacattttttaaccccgtctatgtttttgtttgttttttagcctcccatttgaaacgtggtaatactgtgattccatttcttgtttagctggtgagggaagagggtgggcaagtttatgtaactttttctgttgttttgtttttatttccttttcctttctttttttttttccctattttaatgtacagaaatgcaaactatctctctgggttttttttttctatcttctatgttctagaattttctttttgtgtgtgttactgtgggaacctttcctcttaatgcagagatggcttttgaattttaagtgaacattaatcatatacacatctctatatacttttttttcctttgtaatctgaatttaaaagggaagataactctaaaaaaaaaaatcactcccacaccaacagctcctgccaagtcagcagcggcagcaaatcctcctttcaactccaggcacaggctggagctgccgcagattttaaattaactatagtggtgcagcctgtgctgctgcgttccccaggaagctggagagaagcgggagacccagggaggggaagagacttgtcctgggttgcccagggagcttcttggagcttgctgctactcctcggttcagtttagtataatgggctggacacaggggacagggagcaggacaggctgttcaggaccatcagtgtcagacctcagactcagatccttaggaaactgtggaggaaggagagatctgaaggcacctggcagagtttagctgagacacttcaggcaagcaaaaaattccatcttgggctgggcacagtggctcacacctgtaatcctagcactttgggaggctgaggggggcggatcacctgaggtcaggagctcaagaccagcctgaccaacatgatgaaaccccagctctactaaaaatacaaaaattcggctggccatggtggctcacacctgtaatcccagcacttcgggaggctgaggtgggcagatcacctgaggtcaggagttcgagaccagcctggctaacatggcgaacccccgtctctactaaaaatacaaaaaaattagccaggcatggtggtgcatgcctataatctcagctactcgggaagctgaggcaggaaaatcacttgaacctgggaggcagaggttgcagtgagcggagatcataccactgcactccagcctaggtgacagagtgagactccgtctcggaaaaaaaaaaaaaatagccaggcgtggtgggcacctgtaaaaccagctacttgggaggctgaggcaggaggatcgcttgaacccaggaggcagaggttgcagtgagctgagattgtgccattgcactccagcctggatgacaagagcgagactctgtctcaaaaaaaaaaaatccatcttgatctcgagactgaggccagtgatgtggttactcccaacaaacccctttgttggcccatcccaggtgatggttgaaccccacaggactttctgggttctgatgcttacaggagaaactgcagctccgagaggtcaagtgactggctcaaggtcacacagctatttagaggtagatccaaaagtagaccccaggcagggcgcagtggctcacacctgtaatcccagcactttgggaggctgaggcaggaggatcacttgaggcctgcagttccagactgactggtcaacagaacaagactgtatctctacaaaaaatatatatatatttttaatcagccaggcatggtggcatgtgcctatagtctcatctactgagggagatgagggaggagaatcacttgagctcaggagtccaaggctgcagtaagccatgattgcaccactgtactccagcctgggcaacactgcaagaccctgtcactacaaaaatttaaaagaaaaagctgggcatggtggaatacacctgtaatcccagctactcaggaggctgagacaggaggattgcttgaaccagaagtttgaggctgcagtgagccatgattgcgccactgcactccagcttgggcaacagagcaagaccctgtctcaaaacaaacaacaacaacaacaaaaaatagactccagccctctgactctgacctctagactccagctaagctgtggagagggtggaaaatgggaagcacagtccacgagccctgagcagaaggaggatttgggaggtggttgctggttgactcagctcctgctttcccccatcagacccatccagaaatcagcttcctgctctctcatgtccctaggccaaggtctgcctacactgagagacctgggtgcaggtggcccccacattacagaaactcatatgattgtttcttctgtgactcagggaaccctaaaccctcacagttcatacatgtggggaaataaatatcgaggcacagagagggaagagagtcactcaaggtcacacaatgtaggatgaaagaggaagatactgatcaggagacctcctgggagaagccctcctgtccagtcttacctggtgccttcactggcctccctccagcccccaccagcacaacctggtgctaggctcaccctcccaaggcccaaaaagagtatacagagtttgccgtcttttctattttattattgcattcctgtcccaggggccacctgctcaccttagaagtctctagcgttagaagtttcaggggatggggcaggcacagtgacttatgccggtaatgccagtactttggaagggcgaggcacgaagatcgcttgagaccaggagtttgaaatcagcctgggcaacatagcaagacccctatctctacaaaaaaaaaattttttttaattagccagatgtgatggtgcatgcctacaatcccagccacttggaaggctgaggtgggaggatcacttgagcccaggagttggaggctacagtgagctatcatcctgtctgtagtcccagctactcgggaggctgagtcaggagaatcacttgaacccaggaggcagaggttgcagtaagttgagatcgcaccactgcactccagcctgggtgacagagcgagactccatctcaaaaaaaaaccccaaaaaacaaaaaaccctacagtgtccggggctgtctggaaggtgacacccttaggtgagggtggcagagaaggctcaggatcatggccttggggctctctctggcttctccctgtggtccaaattttatcatgtaatgggcagcctcgggtgacccccaagaagaggtgccaaggcaccccctgacctgccttatacaggaacagaaaaaggcaaaagggatgaattttgctaaaaggatgccaaagccagagggaaaggagtgggactgacctgaggcagggccactcctccagatcggctctgtggttgccttcccttttaaatgcgcgttttcccttcacccatctgtccactccgattggccttgtttaaacagtgcttgtctcctctttctgtctgggggcacctttctctcttcctgcctctctgtttctgtttgcttctgtcattgtttctgtctttctgtttctctttctccttctcttcccatttctatctctgcctgactttgtctgttcgtctgtctctctgtctgcctcctgtctctctctcttcctttccatccctctcccccggcatgggcctctctcccatgctgccagcccctctgtagcccaccctgtggttctcttccatcagctgcttcctgcatgctctatggaggttttctgttgtttgaacaataaagaaagcttggctagtggaacccattgtttaaaaaggagaaaaaaaaaagagcaaacagaaatggccgtgcaagagccccctcccatccctgggatgagacaaaagccacattggccacccatctactggctcagagggggagcacagtttagggtcactgtctttcccccattctgcattcccaatgcggagaccttcttttcttttttattattgcattcctgtccctgagcactgagaaggtaggtatcccagctccgctgtgcgctctcgctcccatctccagataagccctgccactttgcttggtttgaatgtggttttctttctctctctcaatcttgccctggttggtttcatattcctcccttttctttctttattttagtgactactcatttgtaacttgcactttcttcaaatgagctacaaagctatgtttcctggtttgtcatttggttttcttgactttccccgaccaacttttctagcccatctcccctccttcttcaccttccttgttccctccttcttcctctccatccctgacttccacccctaaatcctccttcacgccttctttctcattctgttgtccgaatgcatttctgtgtggtttagcattccaagtttgtgtttctttcctgaactgtatgctgcagtgaagccaatttgatttctgttgtctggagtagctgcgaagcccctcctcacccttcatccctgccagcccccgggacttcggtcaccccgctggccttcagggccctttcgggcaaaaggcagtgacagaggagccagtgcggggcctcctggccttcagatcctggaggaagttctggccaaggtcaggcacaagggaaaagccccatcccatccttgggggcctactgggccaaacggaactctgggcttcctcaagtccttccctggctgcaggatggagctttggggtgggagctgcagggctctggaggagcaacgggcaccaggactgagcttccagcttccatctattgggtgcaattagtagattcatttggggtggcagtgggcagggcagtgagctggccaggagcaggtttgagacctagaaggcctacttagcaaagtctctgtgagacaatttacaggtaatttacctgcccgctgcctggtccatgatccaactcagacaggggctccttctaccctcagcatccttccatcttctgaatttgagcagcttaatgtgaaccctcagagcagaacaattccaaaagaacagccagcagggactaggggcccacagggtgcagcggcagaaccaggactaggtcctgggacttgtgactcccagcccagggctcatccagccacactgagggtactagagtcagaggtggaccctaggggaccccacctccgcacccctgccctttaaactgtttcctttcccacctgggagcagctacagaaatttggcattctggccaggtgcagtggctcacgcctgtaatcccagcactctgggaggccgaggtgggcggatcacttgaggtctggagtttgagaccagcctggccaacatggcaaaaccccatctctactaaaaatacaaaaattagccgggcatggtgttacatgcctgtaatcccagctacttgggaggctgaggcaggaggatcgcttgaacccgggaggcagaggctgcagtgagcctagatcgtgccactgcactccagcatgggtgacagaacaagactcagtctcaaaaaaaaaaaaaaaagaaaaagaaaaagacattcagcattccaaccattatgaggcctacacgggcttctatcttcagctttgaaaagagaaggcccagccactcatccctaccccaccccatgtttatcccggaggcaggtgtcagggagctcacccactcagagcatcctcctcaacactgggtggtgccaggagggcagacagcaagtggctcttggaaaggaagaaagggcaagctaggcgaggtggtaccacctgtagtcccagctactcaggaggctaaggcaggggtatcgcttgagcccaggaatttgaggctacagtgaaccatgactgcaccactgcactccagcctgggcaacagagcgagactcagtccctgctccctcaaaaaaaaaaaaaaaaaaaagaaaagaaaagaaggaaagtgctggtgatctgacaggagaaactgtgttgaagccccatgaggaagaggagggtccgtccttgaggagtttctgatatgaccagggacccacgagttgggtggtcatctaagtcctcaaaggaagcaagagtaaaacatctcaggtgtttacctgttcttgtccttcagagtaccaggaccaggtgaacacactgccccttgctactcccttccaccatcttttccacttgaccctcagaaatttcttacccaaaggttgggcccagtggctcatgcctgtaatcccaatgctttaggaggccgaggcaggaggatcacttgaggccaggagtttgagaccagcctgagcaacacagcaagaccccatctctactaaaaataaaataaaataaatagccagacatggcggtgtgtacctgtagacccagctactgaggaggctgaggtggggggatcacttgagctcaggagttggaggctgcagtgagctatgattgcaccattgtactccagtctgggcagcagagccagacccccatctcaaaaaatatatatatatatatattacacaagcaaaagaaaacatgtcaggtagcaagtcataaaaaggagaggaggggctcctgggaacagggctcagaggcaggcgaggtccctgattcactcactcactcactcattcattcgttcccacacacactaagcagacatgtgcccagcacctcctttgtgccaggccccatctggatgtccatgccaggagagaggcaggcagacctgggcctcccaggatggaggacggacgaagaccactgagcatgatgagaggggaaaagctgaaatgtgagtgggaagctcctgctcaccacggcagccccctggctagcacggcctggcagagtccatatggaaggaaggaaccaggttctatgggatcatagaggagcggacgtgatgcagcctggaaaaggcgccctggagctgagggtagggatgccaataggcattagccaggctgtgggtgggaggtggggagaggggatccctgcaagaggcaccaaggcacaaaaagcagcttcctggaggggaggttcggaggtctctgagcatcctatgaaatcccatagtgcttggccttggatcttcccaggaagcatgagacccagccaagctgaggacgaggctcagactctggcaggcgcatggtgaccccttcctgaggacttccagagggatgggtggagaaggacatgagaggtgccttcctcccatcctctgccatcttggtacttggtggacaccgcatagggtcccccagtccttcctgcactgctctgaccctgtgaaaggaccatgagttggttgtactctgaaaagtctcccaaccccaatataggctgacccagcaaagactccgcttatcctcattttaccaatggggaaactgaggctccccaccgtcaggtgactgccttaaggcgtcacaacaaactcacaccagggccgattccagggtgttccacttttccagtgactatcatcttgggccatggcaggcccgtgacttggaggagatgagaaggaagtggggaagaacttggtcttcaaaaatagcaggcaggaaggatctggatcagcacaggggattggacttgggggcttggaccttgatggtaggggacaggaccatgatgggggtgaacagccatccaacctagaccctttttgctcctaacactcccatcccactctcagcataatgtagtgggaagtcaggagggttctgcagtatctgtgggaaggacccatcacggcctgtggtcttcctcgcctactgttggctcctttctttgagtcagaagcagctggctcaggccaggcggggtggctcatgcctgtaattccagcactttaggaggccaaggcaggtggatcgcttgaggccaggaattcgagaccagcctggccaacatggtgaaaccccgtctctactaaaaatacaaaaaaattagcttgacatggtggctcacgcctgtaatcccttagctactcaggaggctgaggcaggagaatcacttgaacctggcaggtggaggttacagtgagccaagatcgtgccattgcactccagcctgggcaatagagtgagactctgtctcaaaacaaataaacaacaacaaaaaaaaaaaaaaaaaaagagagagagagaaagaaagaaaagaaaaagaagaagtagctggctcaggttcaaactccagagttggagccagggttcacagccaggctgattcctaagttccgtactctgccctgctgcactgcctcccctaaccaaagtagcaagcaaagatttcttaaagaaggagaccagcgtcagcttgagttatgcactactgtgaattggctcccaagcttcccccacctcatatgtgttcactttgcactctttgacgacccagggtataggacagaaactgcaaatataaaaatcccagagaagttctcatttgcctcctgttgagggaaaagaatggtgggctgggggcgcttgaaagttctggggcactggctgcctggctgcctcctggagtggggggagtatgtgttaggggagctgatggtctcctgttgagaacacaactgccatctcagaggggccaacccaaggccgggcacgatggctcacacctgtaatcccagcactttgggaggccgaggcaggtggatcacctgaggtcaggggctcaagaccagcctggccaacttggtgaaaccctgtctctactaaaaatataaaaattagccaggcgtggtggcgggcacctgtaatcccagctacttgggaggctgaagcaggagaatcgcttgaacccgggaagcagaggttgcagtgagctgaggtcgtgccactgcactccagcctgggcagcagagcgagactctgtctcaaaaataataaaaaaataaaaatgaaagaggggccaatccagcctccaactctcctagcctagggtgaggggtgagcttgtgatcaggagagtcaggggtgctcagaggggcaccccaaaaccaggaaatatccattgtgcccacttatgcctgtgtctgccccaaatggagacattaagctctcccaggagaggtcttcatggcctgattggctttgggcagctatggctagtgttcattggctgcttcaggcaccaatcaggagccatctgtgcctttccaccaatgaggttgacctcctgggtctacctccatgttcagctcagctccagccctgcagggaaaggcttggacagcaccttgccctctgtaggaaacacccagggccatgccaaggaaactgtgctccttccagtccctagcggcaaggtgccctgagaggtggcagcatcttttgtcttctcatccaaacagtctgccagtggccgggctcggtggctctcgcctgtaatcccagcactttgggaggctgaggacagaggatcacttgaggtcaggagttcgagaccagcaccagcctggccaacacggtgaaaccccgtctctcctaaaaatacaaaaattagccagatgtggtgacagacgcctgtagttccagctatttgggaggctgaggaaggagaattgcttgaacttgggagggagaggttgcagtgagcccagatcacgccagtgcactccagcctgagagacagagtgagatgccttctcaaaaagaaagaaaaaagaaacagcctgccaaaagagcttggtccaggcaccacctggcttctaggactcgcttccttccttagcaaacagaatcaaagttttactaggtgccaagttcggtgataaaaagtgatgttacagaggtgaatcagataccacatctgccctggaggtgctaaaagtcaagttggtagtggtgatcggaggattttcggggaggaacagacctacaaacagacaaggacagtcaactgctactagatggagggccaaggacaggaggagggatcagctctgtgtagggagggagacagggagggcgggcagggtgcatgcagagaatcctggaatctttgccctggaagggacaccaggaagcaaaagccaaccctctcattttgtggatggagaaactgaggcccagactggggaagtgacgtggccagggtcactcggtgagatagaggcaggctctcagactcctgaatcccaaccagggcccttttgatggtgccagatgcccttcctggttttctgtgtcccaatccttgtgtcctaactccacttttggaaaaacatttgccacctctatccagcggtcacctaagagttgcccactcaggagccgggcgctgccagcccttcctccagaggcggcgtggcctcttctcaggcctagaatggggtggttgcgtttctctctctctctctctatctctcttgcatttttgtgaatctaatgatgaacttatactaccacacttttcccttctcttacacaccttacctactaaaggaggaagtgccactttattggtaagtggacgttaaccaagagggacttaaaaatcagaacttaaaaaaaaaaaaaagaaaaagaaaaagaaaagagagaaacagaaagacagtcgggtgctactgacagctccaaagctctctgcagggccggaaaacaaagaaaaatattaacagaaaaatgtcaggttccccaggatcagatattgtttttgatttttggtatctaatgacatttgtggattttgtttttttatttctgtttttcctccctttcttcggttcagttttgagttcagttgtccccctcgccccctcccccatctgtgtgccgtgtgacgcccccaccccctccatcccctcgcccacccccaagcgctgggggtccggcctggtgggctggccctggccccgctcccggtgccgctctctcttctctctgccgggaatcgtccgtcccatcgggggggcaatgccagccccgatgcctgtcctggagcccctccccctttggcccccgccccccaccgctccgtccctcttgtgttttgcatgccaagaaccctgcatgagctgcactgttgaggccagaaggtggacacccaggagaggcagaggcagggcaggcgcggggaaccgtgtgtgcgatgctccgggactggcagcccccggctcgggcccggtgaaagccctctctccttctctccccccaccccacccgcccgctctctcaccccaacttctcgctcctcttgctctgtcctctctctgcccccactcttgtcccctgcctgtctggattttttctgtttctcgaacttctccctggcttccatccttctctctcttcgctctttctctcttcctctctctctcttctcttcccccacccccgtctctcctctgtctcttcttctcactgtctctgtccccttctctcttgcccccttttttccttctcctccctctctcctcccttgctctctcctctcaccctcgctctttcgccctctctctttctcatctctctccctctcactctgtctctctcctgctctttttctctcttcctctttctcttctctgcctcctccctctctccctctttctttcttctctctgtctttcctctctccctctctcctgtctctcttcattctctctctccgtctctttttctctgtctctcgctctttttctgtctctctgtctctctctctctcctctctttctgtctctgtctctccctctttcctctttctgtctctgtctctgtctctttctttcaatctctctctcccgtctgtctcctctcttctctctctgtctctgtctctctcgtctccctctcccccctccgtgccctgtctgcctctctccccgtcagaagcccagctcgccctcgcccagggtccgtgacaaggcggcggccgccgcacccacgccgcccgcgcgggggaaggagagcccgagcccgcgctcggcgccgtcgtcccaaggtcgcggaggccgcgcggcgggcggggcgggcaggcggcggcggcggcggcgtaggcggcggcgctcgcggtcctcggcgtccgcgccccgccgcaggggtcgccggcgcccccggcccgcgcccccccggggctcgtcgcgctcgctcagcagggcccgctccagcagcgactccggcagcggccgcggcgcccccggccccgggcccgagcccggctctgagcgaggccacggcggacacgggaaacggtgagcgtgctggacccggagctggactcccgcccccaccccgcacagggctcccctccactagcggatccctgcccacgggatccctccccgcgctgagctaccctccagggatcccaaccccctcccaccgagctacccccatggattccacccccccatgagctaccccccacggatcccaacccctcctcactgaactaccccccacggatctcaaccccccacggagctctcctccctctccacggaccccaaacccctatggaccccatggatcctcccatggatttcctccgcacactgatctcaactcccctctcacagggctccctccctcgacgaccccaactctctctagggagttaccctccctccactgacctccaaactccagggagtttccctccccacactgatcccagccccccgacggagttctccctccactgatgccaaccccccagggagctccctccccaccctgagctacccccggttatcctgacccctccccacaactgatccgtctccccttactgatcactgcccccagggaaccccctctcctcccatgaggctccccgcttactgatcactctccccccatcccgcagaacaatctcctccactgatctcccccaacacgccccctcacggggctccccctgaactgacccctgcccctcactaggctccgcgttcactgcgcactccgcgcgaactgaccacaaactacacggaccccgcccctccgccctaagccccgccccagggaaccctccccgcccccagccccctttccgggtcgctgagccctatcccgcgccgtctccctcctccagggccaaggagcggcccccgcgcgcgcggcccgccagcacctctccgtccccgggcgcgcacggccggcgcggcggcccagaagggaagagctcgtcgcgcagccccggcccgcacccccgctcctggagctccagccgctcgccctccaaatctcgctcgcgctctgcggagaagcggccccacagccccagccgctcgccgtcgcccaagaagcccctcagccggtgagtgcccgcccggaccgggccgacggggcgggcggcggggtggagcggccgggccgcgtcgctcacttacctcgcgccggccccgcagggacaaggacggcgagggccgcgcaaggcactctgaggccgaggccacccgcgcccggcgccgctcccgcagctactcgcccatccgcaagcggcgccgggactcgccaagcttcatggagccgcggcgcatcaccaggtatggagggtcttgggggggccggtggcgcagggctggggccgctgacccggatcagggacagagacctcggcccggggaccttctctgaggatccactgaacctggcacggggatgggggggggtgctaagggacaatgagtgggttctgccagggtagggggccaggggaggagggggctagaactggaggtgctggggtctatcagagagacaggtgcaggaggccacgcagaaggaagggccacggtgggggcctgagggcccatgaaggggagggggctctgtacttgggtctgggtgggccgcagccggcatggaattcagctctgcaagagtcccgccatccctccggagcccctcccgccctccctgcatccgtctccggacaatgatgtctccttttctccttcatctcaaggtccagcctgctgagtggcctgtggtcagcctgggggccaggcggacccctctgcacaggctgcctgggagatgcccaagtgagctggtctggccctggtcagctgtccgtctgtctgcctctctctttctcactaacctgggggatttggaggagggggcacagcagtctggtctctggggcagctgtcagaggagccagccacacctccttgccctacacagctgtggggctgtgcccagggcgtggctggtgaagccattatcagtttctctgctaggactggaagtgtctgggcctgggtctccgggtgacattatggtctgcctttgtggaaatcaccctgaagccctagattaccctggcagggggttggggggaacacaggcaaaaagttctgagcccaactctgccactgccttgctgggcagccttgggagatcggtgtgcctctctgggcctcggttgccacatctgtacaataaccagggtttcgtgagcatcttttcagttctaacagggtatgattatcaaactagtccctcctagtccttggtgatccaggtaaccaagaagcatggggtgggcattaccccagagctcaaagccagaccgccttgaaggagaagccagattgtgctactgcttctttttttttttttttttttaagacggagctttgctcttgtcacccaggctggagtgcaatggtgcaatctcggctcactgcaacctccacctcccaggtttaagtgattctcctgcctcagcctcccaagtagctggcattacaggcacccaccaccacgcccagctaattttttttgtatttttagtagagacggggtttcaccatgttagtcaggctggtctcaaactcctgacctcaggtgatccacctgccttggcctcccaaagtggtgggattataggcgtgagcccccgcgcccgaccaaattgtcctacttctaacggatgtcctctcccacctcctgtccagccaccgtgcccaaggaacaaagagccattttgaacccagggatcttcctgcgtccccccttccttctgatgccaactcaccaggctggggacgcccccagacaggtcacacaccctgcccgtaggccaggccctcacaccttccacctggcacccactcagcccctctcccaggctgcctcctcctccactaacgtacacctgttttcttcctcagaattaaccctgcgacggggcagtgttgccccttaacctctcttttctcttctctgggtcatagcctcctggcttccaactaactctgggccagcgggaggtagctgagtgaggagtggggccggcgggactggaccggaccgtgggcatggggagcagcggccaggactcccctccttgttcctttcgagtgacctgaaagcaacaaattccttgattgcagaggggacaggggaacagagaggcagggctgggacgtagtcacagacacttacacgccagcttgggtgatgggagctgtccacatttgcaagtttcattcattcaacaagtttttttttttgagacggagtctcactctgtcacccaggctggagtgcagtggcgcaatctccactcactgcagcctccgcctctggggttcaagcgatcctcccacctcagcctcccaagtagctgggattacaggtgcacaccaccatgcccggcaaatgtttgtatttttagtagagacagggtttcattatgttggccagactggtctcaaacttctgacctcaagtgatccgcccgcctcagcctcccaaagtgctgggattacaggcgtgagccaccgcgcccagcctcaacaagtatttattagcaggtgttcggatcgggcagagacatggtctcctttccctgcagataggtgaagaaaagcaaaatgatcaacatggaatttgcaagtaaccaatgaccgtcagattccatttggagaaggcaggtgtctctaaggccagggctcaggggaaactgaggcaggaagccctggccgctgctgggatggggctcggggcctgggatggcctgtaatcagctttttcttcccggcagcgccgcaagcgtcctattccatactaccggcccagcccctcttcctcctccagctgcttgagcagcgactactcgacccggagccacagccgcagccccagccccggccacagccacgggagctacagcagtcgcagccatgggacccgcagccggacacgcagcccctcgaggacccccagtcccagctaccacagccggagcagctctgagagcgggggcttctgagcccagacagactcagcttggtgcccccctggcactgggagaggcgaggggcgggccccaggaccccagtggggagggggctatatctccttgcccccaaggctacaaagaggtctcagggccagtgcacgggcagatgggaccggggaagactttgagggtgggcatccagtggacaaggagaagccagatgtgctgcttctacgggtgtcctctcccacctcctgtccacccactgtgcccggggaacaaagagccgttacgaacacaggaatctccccatcccccttcctgctgatgccaactcaccaggcttgggactgctgccggtggatggtaccagagtccatgatctgctctgtcacttcaccttagctcagtgcagccagggacaccttgcaaggtgccagccctgggagcccctcttccgcactacacagctccctccactcctctcttatcactgggcagacgaggaggtggtacagcacatgggtttggagctagacagaaggaagaacagcctaacccttggtgcacccccatccaagctggggagctgcatccttttgagctggctgcaggaggaccctggctgagggctggtggctggccccacagcctcccccaagctcctccactgacccaggagtgcccagacgggtggcccccaaaatcccagcctggggagctaggcacctcactcttggtctgacctctccaggccaggctctcctcaccccatgccctgggccaaggtcctaccagccatgactactgcatgacaagaggtggggggtacagacctcaggtacatttgaccctgaggttaaaaggggttcaggtcaagaggtgggagaggaaaggggtagatgggaggtggaatctgtaggaaagagaaaaagcaaagtcgttcactgactgagtagcccccagggagtggagacgggtccctggggagggagcagctgacaggtcagcagtgcccccagccccacccaagaggagggcagcgtgtgcctgtggtctgggacgtgggctggatggcagcccagggtcacaggcataggataacatgtgctttggacctgacaagggagtaccttgggggtctgatggggtcatggccagccgagcctctgtagagatggaggctacagccctcagaagggaggggaggaaagagactgagggccctggcctggggcgtcgatggggaagcggtggcccccagtcctcttctgctgctcccagccccctcctcctggggccctcagggatctcatgaagtcttccttggcccaaccaggcagatgccccgggctccagtggggggaggggtctggggtctggtccgggttccccgctttctctatgtcccccctccctctttctccgcagtgcggataaaaattggactcgaataaaacccttggtgcccggatggtaggtggtgagaccaggcctctgtgcatgttggcaccccgggagattcaggagggcagcggggctggggtcttcctctgagggaggcgaaaggctcagactgctccttgggaccccagagagaagagctggcatccaggagccagtgtgtctatccccctgcctctgagcttgaggctaaaacagggacccaaagagaccttcctcccagcctggaggccgggtggactttgaacatcccacggggtgggctgcctgagcccacacacccaggctaccttcagcagtgggtagggatggggtagagggaggagacacagggtggacataggcacaggggacactcacaacatggtggggtgtcacagagtggttgggacacagcctgaggcagcatgcaggcatgcatcctggctcctgtgcctcccagccatgtgacacacagctgagatgaggtgggcaggaaatattctgacagtcctcagctcagtgactgtgactgccatagagtgagcatttaaaaggtggccacagccgggcgcggtggctcgcgcctgtaatcccagcactttgggaggctgaggcggacggatcacctgaggtcaggagttcgagaccagcctgaccaacatggtgaaaccccgtctctactgaaaatacaaaaattagccgagtgtggtggtgggcacctataatcccaggtactcaggaggctgaggcaggagaatcgcttgaacccgggaggcaaaggttgcagtgagccgagatcgagccactgtactcctgcctgggcaacagagtgagactctgtctcaaaaaagaaagaaaagaaagaagaggaaggaaagaaaaaggaaaggaaggaaggaaagaaaagaaaagaggccaggcgcggtggctcacccctgtaatcccagcactttgggaggccgaggcaggcggatcacgaggtcaggagatcaagaccgtcctggctaacatggtgaaaacccatctctactaaaaatacaaaaaattagctgggcataatggcaggcacctgtagtcccagctactagggaggctgaggcaggagaacggcgtgaacccgggaggcggagcttgcagtgagctgagattgcaccactgcactccagcctgggcaacagagcgagactccgtctcaaaaaaaaaaacaaaaaaacaaaaaaacaaaggaaagaaagaaaaaaaacaaagaaaagaaagagaaaagaaaggaaagaaatggtggccacttagggaaaaccccgtgcctgcctctggctagggactagcagggtgcctggaaagagtggtttacagaagttaatttcctttttatttatttatttattaaaaatgtgagggccaggctcagtggctcctggcctgtaatcacagcactttgggaggccaaggcgggcagatcatgaggtcagaagttcaagaccagcctgaccaacatggagaaaccccgtctctactaaaaatacaaaaat

SEQ ID NO: 586 - DNA, 183964 bp, Homo sapiens
  source 1..183964: mol_type = genomic DNA
cctgcaccagggccatttgtgttgtgaaggcaactgccaggctgccgaggggccccaggctgaggggtagcacagcacacagcaggcgctcttcccaggctgggccccgtgacctgccttcctccagctaggcaccctgatcccatggctctcgtctgtgcctgactcctgctccaaggagcacaggtatcggatggatatcccatccacccaacctcctttccccagccctgggtcagcaccattgatacaggttagtcgcagcctcagtctcttcatctctccaatggagatgcttttccaatagttcaaaggtgtctgtactcagcaaaagcctaggaaaccttgttccaaggtgaagagggaaggaccagatggaatctcctagatcctcccagctactccccaacacacccatttggactctccccacgagtaacatcacttgtagcgaacacatgctgctcttagtccgtgcacggcactgttctaagcacttcacggtgctaacctcctcacagcctatgaggcagccaacccgccatcccccattttgcagatgagagaactgagaacagaagtatcaactaatttgcccaaggccacacagcaagttgcagcaaacaagatttaaacctgggaatttgctatctggtcccctaagggctttataaacatgggctgagcctgccctttgcttggaccctctgtctcccacccacccaccacggcatccgctcctgctacaagcctagaatgaggtccccagagctccagggaagtacaaagttctttctagtcgtgcaagtcagcatccatagcagcttacctcaccctagccctcagcatttcttgcctaaatgtcgtctgggaatgcctctctccatatcttgccagccccacctgattcatctcccaggagaccaccagcatacactttccaaaatttaagtagactgcactactctcaaaacccttcaagggctcccagtacaccttggaggtttaggaaaaaaaaaaatcaacctccctgtgccaacagtcgccaacagcaggcacttgaggctgggggcctggggtgaagccagtcccacccgaggggagaaagcagggagtggctgtggccctcctggccgatagcgactccccatagaaaacagagggcaccaggaggaacctttttctacttccagaaaaataaaagacattccagcggaccaaaatgtgtttgcaagacaagaaatggaaaatggcttttagacggcccccaaatatttaaagtgagatggataccttccctcccaacccaccttccgccaaggccatcgcgactccacaagaacacagaatttgcaggcccaggaaaagaaggcagacgcctcaaacacaaaacatcttgttatgcaccaggaacaaaaactgtgcccaagaagtcaccttgcattttgtaatcagtgtaataaactccaacccacattccccaaacatgtcaggaagggctgcggaaaaaagatgtccctttaataaaacgttatcaacatatatcgtacacaaactacaatgtatcataattacttttttttcctctcttaattcagaaccagactacaaggtaagaaaaaacacagaaacagctacaatgttcccaataatccgcacaaagtcttttttcaggcagatgatatctcacataatatgatatacatggatcagaaagggagggagtaaaacaaagaccagctacaggggagggaggaaggagaagggcatgtcaatgtacaaagaattcgggtgtcttccagggcaagacacaaaggtttccgtggggtgatgaggtgagtggggccatgagcaccctcccgggaggggacaggctccactgtcgggcttgttggtttttgaaagtaaaaacaggactggagccagcacgtctgtttggttgtcggtgtccccccaccccccacagctgctccaaagtctttccatccagtcccaagcatatacagagcaattctgatcagtatcccatctttgagaaaggacgaataaagagaaaaaacaaagaaaaccggaactccagccccccaagccggtgcacacgatgacgctgatgcgaggatctcgggaccagaacgcggaggtcactgtttccatgtcccaggtcatagccatcctgtcagtggcagcctctcccactctgcgccaggccaccacccagctggcaggattctcactgggaagactggggtgggggcagaggaggggctggagaggcagggaggccaggacggaagggaggtccaggagaggaggagggtgtcctgggaacagtgcatgccaccgggtcacggtgacggtctgggctgtggtggaatcctgaaaggggtcagtggtccggcccctctggccacaggatgagggtgctgggttctggggtccaagcgtgccgctgctgttgccatggaaatcaagctagaacaaacgcgtccccactcctcccctgcctgttgcacaaaccaaaaccccaagtggaaaacggtgactgccttttcttctttccaaaaaaggccttttgaaagaaaccaacgattgtaaactgtccagtttattattattatttttgatggctacagacaatgtgggctctcacacctagactagcttttctggtggaagggcttgggcacagacagacagcagggcttctggttttccttttttttttttcctttttcctttttttttttttttaagaagaaagcatagaggttgattggggtggggggcttgctagaagcttccatttaaaaaaattttcccccaaaaaacccccctgaaaacaaataaaaaaatcccaacaatggtaaaaccccaaacaaaaaacaacaaaaaagtgtcatgtacagaaaaggtcctttggggaaagggcaaggggtgggatttttctggtcactgacttgaaatacatttttgagagttttgtccttcttgttttatggaataaaaagtttggcctttttattgcatgaaactaaaattgggaaaggtagggggcgtggatggggtgggagggggttgaggggagcagggagatgccctccccaccagctcctggataatgacacctcacttcttgcataatttctggcatcttcccgcctgcaatgcctgctctctcagcgtctcggagaaggggggatcacacactcatcgtcatgcttggagaatactggaaaggagaagcagagaaggggggggggtgaggattgtggggaggccgctgacacacccaggtgccaagagcctggggtgactgcacagaactgagcagggctcatttggggatgtggttgagctgaggggcacatggtggcatggagtgggcagggggccggtagggcaggataagggccaggaggcgggagctaagagccacttctcagtgccagcctgcccttctgttgggaactaaggcagctgacggcgcctcccctgctcctgcccctgtctgagtcatcctctcctctccaatggcagtcacagcccctgccccttgcccagtgcaggcctccagactgcagggaactgggctttgatgagccagagcacagccagggtgccctggggtggggccagtctgggattcttttctgtttttctttttgagacaaggtctcactctgtcactcaggctggagtgcagtggtgcgatcaaggcttacagcagcctcaacctcctgggctcaagcaatcctcccaccttagcctcccaagtagctgggactataggcatgcgacactacacccggctaatttttgtatttttatgtagagatgaggtttcaccatgttgcccaggctggcagtctggggttcttgaaagctgcttaatcataacactgtttcttcaaatgagaatgcacacagaagcccactatagaaaagcagacagccaacccgtgttgagagccctgaaaatcgttggctgcacgaacctttccccactggacagatggaaatggacccgtggggcaatactgccccaactctctcagcccagggctctcccggccgtatcagcttaatcagtgccagaggcatccagcctgcatggagctgcctccagaaggccccaccagcaggcagtctcagggcagcgtcaaggctgcacacttctgctaaaaaaataactgaggtggaaaaaccataacacggccaccagcttagctggcaggctgcagcccggctccgtagctcgcaacttgttaggaaagagtccccaggccgtggggacgagagcaacaggcagggggcgaggcttacattgtcgttctgaaaggagtggaggaagttccctcctagctcgccgtcatctcgaggggtgcctggaggattgctaatgccacttatgttgttaggagaattctgtggaaagaggagaggaggtgagcacctgtgtccccaacaacctgcccacacagatggggcgccgccagggagaccgagtgcacactcacttttggaagtccgtctatgtcgcctgaccctggaaagaaaaaataatccaattcagtttcttgcttgctcttccacggaggggtctcccctcgtcctgggctcctcgggcctctaagcccttccatcccagtcccacactgtgcggagggctttctgtgcggcatccctctcaggatcgtcctgtgtgcccagccaaggccggccagggctctgtaccaagcccagctgagccaggagctgaggcacagagctggctgcccaggcagggtggggcatggcgagggcaggggccactcacctaatgatccattcatgtggtgtggctccatgccacccatgccgcccatcggaccgtccgagccgggacccatcgggaactggggaagaagcacagggcatggcagctcagcgggccctggccctctgcacccctcacaggcagggggctgcagccacgcttgagtcctggccctggggaacccctgctccggcaggctctgctcacactcggacatgtcctgcctggcagctgggccagggtcctcacctcggccctctaagctgcagggcagaggtgctcattccaatgacccaggtgagggagagggactggcccactgccacccaactccacacagaggcacctctgaaactgagcctctcggatcccaccacagggccctctccatcccccgtgtggagagtgtggttccccagacagaggcacatgtggacagctctccgaccatgtcaggccagggaccaaaacatctgtgcttctcatccccacttcacaggtgaggaaacagaagcagtgagaggaaacgctttgcttgaggtcccagaggctggaggtggaggagctgggactggaacctggcagcaggcctggagctgtcatgctggccctctcccaagttaacaaaaggaagaaattagaaatgaagatgtttcctggggctgggcggtgagaagaggtggggtttgatgagtggtggggaagagagagctagggcactggccctggaggcactgcatggcaccctgggactgtggggtggtggcaggaggtcactgatgaggctcccatgcagaactgttggtgtggcagatgagggcttggagataagagtcgattctacccacccacaagcctatctggaactatcaaacccttctcggaaaggaagaccagaaaggtcacatcccacagccacgagtcacggggctggggaggggcggctgagcccagcctggagcgccaaggccctgtgatgcagactgcatctgcatcgagtgggaagggagtggaggtggtggaatggagggctgtttggcacctggccgggactgggtgccacagacgcagagctgagtcacacctgagccccagcccagaggagcagctcacggatacccaactaccccacaggaggacagagatgctgacttccaaagacagctgcaaagtacagctgcggcttcagagcaaggcagagaaatcagaaccggctgcctggaggaggaagagagcatcaacaaaattgaggggtaaaatctgggcaggcagagcccatcgcggaaatcactctaaggcaggggtcccacatgagcagaaggctaccaagtgggtggcagcatggcgtgccagagcacagaaaggggtgtaaggggtaaggctgtgaccaggctgcaggggcacagctagggtatgagctgcttccccgtgcccacccagactgggggaggggtggcgcatccttgcctctccagtgggccccccaccaaagcagctcacaggcttttgggcacattttgccatctagcaaccaatttcatgcttattaacctaagtgataggaggatgaaagtaaccagctttctagggagccaacccaggacacagccatgccagacccccaaaatccccaaacatgataatacagatttatgcacatgtatgtcattaccttaacatgaatatgtcgctactttaacatcaatgtattaagaaacaagtatttcttcaaaatgacatattattgtatactttctgtatattaagttttattgagatataattcacagagcatataactgacccatttaagtacaattcagtggttttcagtatatttacagggttgtgcaaccatcaccacaaccaattttgaacgtttccataacctcagaaagaaatcctgtacccgactgcagtcatttctgtcctcctccaacgcccccggccccaggcaaacactaatctactttctgtccatggatttgcctatcctggacatgtcatatacatagaatcacgtgagcttttgtggctggtttctttcacttagcatgttttcaaggttcatcagtgttgtcacatcaatcagtactttattccttcctatggtcaaaaagtagtccaccgtatggatataccacatttcatttatccattcatcagcagaaggaacgttcaggttattttcactgtctgactattatgactaatgacactgatgtaatgacactcatgtctgccgtgtggacatacgttttcatttctcttgggcagatacctaggaggagaactgctgggtcatagggtaacccaattaccatatcacagcagacatcactaggctgtctgatctttcgaggaaacgtcaaactgtttaacaaagcagctgtgccattttacattcccacgagcagtgtctgagagttccaatgcttccacaccctcgccaacaccagtcattatcttttttactacagccgtcctagtgggtgtgaagtgccatctcactgtggttttgatttgcatttcctaatgactaacgatgctgagcatcttctcatgtgcttactggctatttgtaatttttggagaaatgtccatttagatccttgtcccatttttaaattgggttattactgagtttttctaagagttctttatgtattttgaattcaagtcccttatcagacacatgatttattttctccattctgtggtttgtctttttacttccttgatggtgtcctttgaagcacaaatcttaatctccgatgaagtccagtttgtctacttttttcttttgctacttgtgcttttggtcttgcatctaagaaggctttgcttaactcaggtcatgaagatttactcctgtatttacttcaagtgttttgtagtttcagctctaacatttagatctatggtctactttgttttattttttattattttttaatttatttttgagacgggttctcactctgtcggccaggctggagtgcagtggcgtgatcttggctcactgcaacctccgcctcctgggttcaagcgattctcatgcgtcagcctcccaggtagctgggactacaggtgcgcgccaccacacctggctaattttgtatttttagtagagacagggtttcaccacattggccaagctggtctcaaactcctgacctcaaatgatccacctgtttcggcctcccaaagtgctaggattataggtgtgagccaccatgcccggccccctatgatctactttaacttttgtgtactgctgtaaggacacagttcaatctcatttgtccacatgtggatattcagttgtctcagcatcatttattctgtattatttacttttccattagattaatgctattatgtaaacaacaataggaactgttaacagcggcaattagtagcaattaggaggtggactagttaaatgattgatatgtatgaggaaaaatattaatatttttataacgtttctgtcctctgatacagaaataactttttgctcgaatacttaaatttgataggctatattacattaattattttttagagatgaggtcttgctctgtcacccaagctagagtgcactcaagtgatccacctgcctcagcctcctgaatagctgggactacaggctcgagccactgcacctggcttattatttatgtttttttaaaataaaacataggccaagcatggtggctcgcacctgtaatccctttgggaggctgaggcaggaggatcacctgagcccaggagtgcaaaaacaacctgggcaacatagtgagacctcatctctacatcaacaaataaattaggggccctctccctctccccacggtctccctctctttccacggtctccctctcatgcggagccgaagctggactgtactgctgccatctcagctcactgcaacctccctgcctgattctcctgcctcagcctgccgagtgcctgcgattgcaggcacgcgccgccacgcctgactggttttggtggagacggggtttcgctgtgttggccgggccgtctccagcccctaaccgcgagtgatccgccagccttggcctcccgaggtgccgggattgcagacggagtctcgttcactcagtgctcaacggtgcccaggctggagtgcagtggcgtgatctcggctcgctacaacctccacctcccagccgcctgccttggcctcccaaagtgccgagattgcagcctctgcccggccgccacccgtctgggaagtgaggagtgtctctgcctggccacccatcgtctgggatgtgaggagcccctctgcctggctgcccactctggaaagtgaggagcgtctccgcccggccgccatcccatctaggaagtgaggagcgcctcttcccggccgccatcacatctaggaagtgaggagcgtctctgcccggccacccatcgtctgagatgtggggagcgcctctgccccgctgccccatctgggatgtgaggagcgcctctgcccggccgcgaccccatctgggatgtgaggagcgcctctgcccggccgcgaccccgtctgggaggtgaggagcgtctctgcccggccgccccgtctgagaagtgaggagcccctctgcccggcagctgccccgtctgagaagtgaggagcctctccgcccggcagccaccccatctgggaagtgaggagcgtctccggctggcagccacaccgtctgggagggaggtggggggtcagccccccgcccggccagccgccccgtccgggagggaggtggggggggtaagccccccgcccggccagccgccccgtcggggagggaggtgggggggtcagccccctgcccggccagccgccccgtccgggaggtgaggggcgcctctgcccggccgcccctactgggaagtgaggagcccctctgcccggccagccgccccgtctgggagggaggtgggggggtcagccccccgcccagccagctgccccgtccgggagggaggtgggggggtcagccccctgcccggccagccgccctgtccgggaggtgaggggcgcctctgcccggccaccaccccgtctgggaggtgtgcccaacagctcactgagaacgggccaggatgacaatggcggctttgtggaatagaaaggcgggaaaggtggggaaaagattgagaaatcggatggttgccgtgtctgtgtagaaagtagacatgggagacttttcattttgttctgcactaagaaaaattcttctgccttgggatcctgttgatctgtgaccttacccccaaccctgtgctctctgaaacatgtgctgtgtccactcagggttaaatggattaagggcggtgcaagatgtgctttgttaaacagatgcttgaaggcagcatgctcgttaagagtcgtcaccactccctaatctcaagtaatcagggacacaaacactgcggaaggccgcagggtcctctgcctaggaaaaccagagacctttgttcacttgtttatctgctgaccttccctccactattgtcccatgaccctgccaaatccccctctgtgagaaacacccaagaattatcaataaaaaaataaattaaaaaaaataaataaaaataaaaaataaaaaataaattaggggcaacatagtgagacctcatctctacaacaacaaataaaattagccgggtgtggtggcacgtgcctgtagtcccagctactcaggaagctgtggtgggaggaatcccttcagccccagatgctgaagctgcagtgagccatgactgtgacactgccctctagactgggtgacagacaccctatctctaaacagacaaacaaacaaacataataggattaatgaaacaaacattactaatatttaaataaaaaataacaatgtttctttctgccctaggatacattagaacattctgctctgctttctttcccactggtctctgaattgcctgaagcctttatagcctttaggacatcctttttataaaagaaaaaaaaaaaaagagatggagtctggctctgtcatccaggctggagtgcagtggcatgatcatggctcactgcagccttaaattcctaagctcaaacaatcctcccgcttcagcctcccgagtagctgactacaggcatacaccactgtacccagcttagaacacctttcttttaaatgcactggtaaaacggaatatagtcaaacttaaaatccatttgacttgtcactctgtttattcaaagcccatgttacactgactcctagtgtcacctaacacggtaccaccaaactaaatatcctctccacacaacccttatacacaaagtacctccggttttacttataagcacaggttttgggacttgtaggaattcacgtccatctctccaaagatgtccatccatttttgtccaggggctggctttggaggaccagctgcttgtcaatcaggcctttgcatctgtaattcatcagatgggctatccctgtctaagatgtccagttttttttttttttttttttttttttgagacagagtctcactctgctgcccaggctggagtgcaatggcacgatctctgctcactgcaacctccacctcccaggttcaagcgattctcctgactcagcctcctgagtagctgggactataggcgtgtaccaccatgcccggctgatttttttttttttttttttttttttgagatggagtctcactctgtcacccaggctggagcgcagcgttgcaatctcagctcactgcaacctccgcctcccgggttcaagcaattctgcctcagcctcctgagtagctgggattacaggcaccagccaccacgcctggctaattttcgtatttttagtagagacggggtttcaccatgttggtcaggctggaactcctgacctcaagtgatcctctcacctcggcctcccaacgtgctcggattacaggcatgagccaccgtgcccggccagatgtccatcattttttaacactccaaagcacaatggatgttataaattaaaattgttataaaaaatgattttaaagcacagaggtaatctgaagttgcaaaatccaagttggattccaaatatgttatagttttaatgaagaaattgataaagtcctgtttaacttgactgccttttctggtgacattttttgagttctcaagcattaaatgggtcattattcctgctgtatgaggttttgtggccccctctccaatccaagtgtggctggctagccccatctaggctcctcggggctccttaaggagcatcagagagtactggcaaaacagtatatacatttctattttatttttaatgtgtttatgtattttttttttctttgaaacggagtctcattctgtcacccaggctggagtgcagtggtgtgatctcggctcactgcaacctccacctcccaggctcaagcgattctcctgcctcagcctcccgagtggctgggactacagacatgtaccaccacacctagctaatgtttgtattttttagtagatatggtgttttactatgtttgccaggctggtctttaactcccgacggaccccaagtgatctgatcacctcggcctcctaaagtgctgggattacaggtgtgagtcaccgcgcccagcctatgtattttttatttttatttttttgttgcagagatggtgaggatgtcttgctttgttacccaggttggtcttgaatttgtggctttaagtgatcctcccaccttggcctcccaaagtgctcgggttacaggcgtaagccaacgtgcctggcctgtattttattgtaattcctttttccattctcatctcaatgcatttccaaattagagaaggacatccttcttgtctcacactttaaaaaatagcagttttcatggcaagccaacattttaacatcttttctatggccagcaatgatagtcatcttgtggaaacgtgtctgaggcattctcctgtctataaagtcaaagatctcattaagtgctttggcatgttttgaggaaaccgaaaggtgacccaaaactttcattatgaaagctggtatcacaggtaagcaaattacacccctttgtgacagtgtcgggtacgaggtgtgaacatttagcaggtaagatgttttcattttcattggtaagaagcttatggactaaatgaaatttgctcaaattaactgtgtactgtctgccaaatatgtagataaatgagcaaagtctaggttgtatttggacaagagaacaacaatctcttacgtcttcagtggcttcactaaaatcttcacagaaatcgagaagacgatctgaaactccagttttcaaatcaacatacctaagagctagcggaaacctgtagccatgacttcaggcagcccttgacgcactcggaagcacgaatgctggaaggatcagacagggtcagcactactgtaaaggggcaatgcatctgttactgaaagtccctcgtcctttggttcacacacaggacttttagtttgtaacctccgaatcaggaaatgtaaccttcttggtttgcggtgcaatcaagggaacaagatgataatggcgtccattcaaggagtgcgcccaagctaattctgcgaccactgtttttgactgagaactgctgtctctttggaggtcaaaaaaaccttgatttagaaagatatgcctcagacttgagagactcaatgtccaatgtgcctccacctccccttctccatatgccatttctcacattcttttctgcacaccgcgcagtacattctgtttgggttctttcctccctaatccagttgtgtgtgtccttgcatctgtcattaaagtaacatggtcatttaaccttctttcccagtgatgcctgggtcacgctggtgctgtcattgtcaccgttctcattttcatcatctgaactcttaggaaatacagtcacaatattcatgatgtcaagactgaaaccagcaccgtctagacaaaaagcccaacactgaatctgcagcagactcctaggcaagtgctgctaacatgcatgactgcagcgtgcggagttgcagcctgagtgatgtgatccatggtgaatcacaagtcctgatgccagcatccacgtcaggcaacatggcgacagtgaccactcgaggcagatcatccacgccatttccatccgatgctacaaatggtgctgtcatccctctgtgtgggtttcatactttccacccaaccttctgcatcactgacaaaacccaggactttctgtgtcctgggattcctcaggatgtggggctttttagtgttaaaagccagatggttggtcacaccagtgaggaccctggcaacggaggcaggccagaaaccatccctcagagggctgctggatgtaggcaatatccagcacagggcagcccgcgctcggggtttaacacgtggggtgatccgggtgtcacctcaggaacggagccaacaaaaccagagtgccccaaaaggccctaccccctcaaccaggccaaagcctcgcactttagggccccaggcccactctctggctctacagtctgtagacctccttttcagaccctgagctcctggaggggcaaggctgaacaggttcacctgaggcctgcatggaggaggaagggaaggaactagaatggaagggttgcctgtggaggggaagcagatcaggccccgacctcgggcaacgccccctgggtgaggagacaggctgcagctgactaaccaagtcccatccagtgggtgcaggggacacaggaggaagtggggcaagcagtaatcagaaatggggaaatgtgagctgcaacatcacccaagggctgcaactctgagaggcaaagaagctgccaggtattgggagttccagagctcctggcagcagcacaggcaggcgggtcccccagcgagccctgtccccttgctgctggctccaccctcaactccatagccccagaaacagacccaggaggagagggattgcccgggccacagccagtttgctgggcagagaccaggccagaccccacctacagcatggcgcttcccccaccagcacggcaggaggtggcaagtcccagcagcacagcgggcaccctggctctaaccagagggtgggcatcgtcccaccccttcctctcccaccccctgccgcccatgaaatgggaactgagttgcccaagagttaatcacttttctgacggtttattttattcatctttggtaacaaatggctgaaatcaattaaacttgctttcccctcagctgatgaagttaattatgatttgttatggtgtctgatatgtaaattattagaaagcagacttacgttggaccggctgcctccaggcggcactggattaatcattgtgtagatgttgtcactggaatttgttgaatctgtagaacagtggaaacccacaagtcggggtgattaattcgtttcttaattaaaacaaactcatggcactggaactcattcttttgtattttataacctaaaatttcctctaagtaccaccattttctggctaatttgtatttaatgaagattcacaaagtttttaatcacagaaaattcaactgtgaaaaccactcaaccccagcagtgtggacacggcacagggggattacgggttcaaattcttgtctccccaccccacaccgaatctggtccccagacactgcctgggacaacatgggggcagcagaaccaccacctgtgctctcctcccaccacctgtgctctcccaccaccctacaaagtggttttaatcaaatcagggaaagggaaacgtggcaaattacccagaggccaccctgccaggctgatggggcaggagggagaggcagggatggggctggaaacgcattcacatatggagtgggtgcatgtggcccagtcggaatgtaggtcatgcagctcatcaaaatgcagcagcagaaagagagagccggagtgggagcccaggatcccggctgcggccagctccacccctgcagctgagcagcttccctgctatggggagccgaggagggggcgggggagagtcccctccatctccccagttagccaaaaaagtctccagctaaaacgtttctatcaggagcaggcgctgtaattcttgggcagaaatccagctacctctcactttttatttttggggtgggtaaggatcgtatgttgaattccttctagctggctggtatgctattcttagctgggaaagaaacataattgtgatggggtgtgtgtgtgtgtgtgtgtgtgtgtgtgtgtgtgtgtgtgcgcgcgcgcgcgtgtgcgtgcgcgcgcgcgcgcaacacatgcccacgtatgtgcacgcatgccctcttttgtttaaagaaacagggagggctgggtgtggtggctcatgcctgtaatcccagcactttgggaggctgaggcgggtggatcacctgaggtcaggagttcaaggccagcctgggtacatggtgaaaccccatctctactaaaaatacaaaaattagccgggcatggtggtgcgtgcctgtaatcccagctacttgggaggctgagacaggagaatcgcttgagcctgggaggtggagattgcagtgagctgagattacgccattgcactccagcctgggtgacagcaagattctacctcaaaaaagaaaaaaaaaagggggggggggcgggggggagaagggatctcctatatagaggaccagaagccaggagctacggaaactccaaaggtagcatgcctcagaatcctggtcccaggatggcagaaccccaaggcccctttttgagtcatttggggaaatgcccaccctgaacagggttcttcccaacaaaagggattcaaaggcaacgagaatccctgttcctggactgctctgctcagccctgtcctttatggagcagcatcagaggagtaggttagtgtcatcaagggaccccctgccctctaaatgcccagtggaagatgtgctgcccaggaaggagtggctggtaagctctggctctgcaacagtgcccctccaggtctctctggcaacatgccccaccctccaccaccagaccccccactttcccctcaagcgctcttacctgcgggactgggcataatgggtgttcctggaggaccgccaccaccagggggtccctaaagatgagacaaaactgacatcagacacccacggtggtaacgaacatggggaggggccggcatcctccctccctggtcagcagcaactgctcgccccaggcccagccgctattcatcttgctacacccccagcgctcactcaaagtactcaagcttgagaaggggacctggatgtcccctgtccctttcttcagaccaagcggcccctgtgggtgtgtgtgcctgcattatgtgctcacaggcatgcccactagagaggcctgcggtggacgccaagcagcccactggtcagctccccagaaggcaattccacccccaggtctggtttggggatttctgggccaccttgggtctgtacagatgactgaatattgacagcaagttctagcagtttggaacctctgctcagaagaatgtgtgaaagggaaagaaacggggaccccagaccagttctcttgcacactcagtcccacgtggctagacatgcaatgccccaaacccacacacttaccacataggtaccaggtgatgaggaggagtatggaatctaaaaacaagatgtcagggagccccacgtcagagtcactgagtgccctcagctgccaaacctccctgaggacacgacccactcttcacaggaaaggcatcgccacccagtgagctggccacccacttggttcccctgggagggctgggacgtggctgaagcccagttctctctgctacattgaactgaccctgagaccctggtctcttactccccagtcctgggagggagccacagacacagggaggacatagaaggccctccggtttgagagggcaggaaacagctttaccccacattcctctggccttcaccccactgtctgtgtggagcaccttacccgcaccttccagccctgctggggaggagatgggtagaggtctccactctgaacagtgctctctgagcccaggttctcagcttactccttagaggagtgggctggctgggcaggcagggcaggggtggagcccttgatgacccctgcacattactcccaggcctccacctccacacggccttctccctagaagcatcaggagagtcctgctgcatctcccacttcccgtgacacctacacccagggacagtagctcccctgcacccagaaccgctcccctgacaaacaccaccccacccgacccaggtactcactgagttagcactgttaggattgggccagggtctgccagctcccgggcccctgagagagggagaaagagatgtggacaatgaaaaaggcgctgtaaactccaagcggtggaggcagcaggggcagaaggaaagggctgaaatcacaacaggaagtccttcctacagccctgcggtttagagccttctggctcagggcagtaatgggtaacttcatgggtggaaatctatgaattgctttaaattataggtaaactttacaaagtatataaaattagataaaaaatatgtgaaattccctttgcatgtgcattttcctaggaagggagtccacattctcacaacagggttaaaaatcacaaatgcactagagaacagtggctacactgtccagaggttcaactcttgaccctgccactgaaagctgtgtgagcctgggcaagttacttcacctctctgtgccttggtgacctcatctgtaagggggttataataataaccgcgtcaggccgggcacggtggctcacacctgtaatcctagcactgtgggaggctgaggcgggcagatcatttgaggtcaggagttcgagaccaccctggccaacatggtgaaaccccgtctctactaaaaatacaaaaattggccaggcatgttggcgggagcctgtaacaccagctactcaggaggctgaggcaggagaatcgcttgaacccgggaggcggagattgcagtaagccaagattgtgccactgtactccagcctggacaacagaatgtgactctgtctcaaaaaaaataaaaataaaaataaaaatcatcgcgtcatagggtaatcatgaagatgaggtgagctgatgcacgcagcatgcctgaaccgtgcccggcacacagaggcactctatgaggctgagctctcatcaccaggatcatcaatatcctcacattaccgatgaggagactgaggtccagagaggtaccagcaatgaccccttatcatgagtctcccagggtgctggcagagggtgggggaagacctggactctgagccacgggccgggtcgtttttgccttacatgttaatcccgggcatggcggggccgagggagttgggtggtggtctcatgccgctgccgtaattctgcaacgataaccaagggtcagtctatgagaagaagggaaccggagacaggaggagggaggagaaacaaacagacaaaacatagtgagagggttagtctgtgaaaaggattgatgagaaaaaataatacattctttcaaaaacggtggggcgggtgggaaccaagtcacagggaccacaatgacaagccagcacagagggacagtcacaacattcagtgcattttcaggagctttcaagatgaagttctcaaaaacatgtggctatccagcaagccgctgccctctctgggctcccatgatgtcatcctgtaccttccccctgggctcaggcgggtaagaggggatggacttggtcttggaacccattgagaggctctgaggtgaggaggcagggaggcgaggggtgagtgtcaatgtggatgggagcaggcactcctgagaagcctgcccgaggctggtgcaggcccaggcctggcacatacagacacgccaacctgccccaggtccaggtggtagtcctaccccacccatgtgtcagcatcagaggccctccacagacatgatgctgggaagccggagaaaactccatttctgcactcagggatcatcactatgtgtgtgtgagtttttttttgttttgtttgttgagatagcgtcttgctctgttgcctaggctagagtgcagtagtgcaatcataactcactgcagccttgacctcctgggctcaagcaatcctcccacctgagcctctcatgtagttgggactacagtcatgcaccaccatgcccaactaattttcgatgatttttttttttttggagatgaagtctcactcttgttgcccaggcaggagagcagtggcatgatctcggttcactgcaacctccacctcccaggttcaagcgattctcattactcagcctcccaagtagctgggattataggcgcccacgaccatgtcgggctgatatttgtatttttagtagagacggggtttcaccatgttggccaggctggtctcgaactccttacctcaggatccacccaccttggcctcccaaagtgctgggattacaggtgtgagccaccgcacccagcctgcccagctaatttttaaatttttttgtagagatggggtctcccttcattgcccaggctggtctcgaactcctgggctcaagtgatcctcccacttcagcctccgaaagtatcaggattacaggcgtgagccactgtgcccagccaatgtttgagagaaaagtctacacagaactcacgaagtcccagcagtccagattcagctcaggacggcccactgaggcacagcggggtgggtcaaggcaccaggcctcgtatcacgcgcatctcttcctatataaccaggccagtgttgctcgtgaccctctctccaagtgtcattttccctgcagtcatacatgccttgcttccctgctccctgcttggcaggctcctactcagctccaagagcagctcctctaggaagccctcctgaccccaccccttcgggctgactgctccagccctgttactcccacaatgccttctaacctccctcccccgccaccatgctacactgggtctgatcatggccacgtgtctgtccatctcccatctctcctagtggactccaagtgccctttgaaggtggggctgtgtcttgatgatcatataccccccaccccatgcacccagtggcacagactggcactcactacgctggcactgaagcaatcaatgaaagaccgaagaagggaatgcatgaagaccaaagggagcctggctgcagcttaagctctgcccttgtaggagaacttgaagtaggttgctggaattttgatggcaaaggaacagccagcattcactgccctttactgagtgcatgacacactttatgtacagtctcttgtttgatctgtgtgaaaactccaggaggctgggattgttcccacttcagtctcccagaaaaggagactgaaggtctgagggagaaagttttgcctcaagttgcagtgagcaaatggacagctaggatttaagcctggatctgccggccccccagattctgtatgcttagccaagaaactggcgggaggcgggtgggaagggggacagaatgggaagatggagacctggagcctgacacacacagagccaatattgggctgatagtgggttctgcatccagggatcatcttccaaatctcaccaccctggggccacctgctccgcttgctcagccacagagaggcttggagtctggaaggatgtccagacaggatgcagatgatctcaggagcaacaccaggctggctgacaaagagccagacccggagccagagaaggcaggccccgcctcaccctgtggctgctcagggcatgggcttcaagcaaacagtggcagccttgtgggaatgtgctggggccaagcccactctaccacagggtgaagagcagaactcgagacctgaggtcagaacacaggaaggctggccttggcttggctgcctgctggtgactttgggcaaattaccaaatgacaatagtgcttattccatgcccacatgtaccacagactgtgtgtgcactgcctacaataaatcgtcacaatgacccctttcctccacccactttagagaccagaaaactgaggtagagaggaagaatgaccccactgtgcagttgtgcgtggctgagctggggtgaagccctgcagcatggctctggctttagacccacaatcccctctgctgtgctgccttgtctataaaatggggacaaagagccccatgtgtttccaaccttgcaggtctccagtggatcaaatgaaacaatggttctgaagtgccccgtaagccctaggaggtgtgcactgatttgggacgtcagcagcagaacaaacaccaaagcccttaatgctaccgcagcattgcagaagcttgggtctcaaagggccctttctaatcccctctacaaatctcagcctcatctccccacctgctgctccaggacaagcagcttgccacctccccaggcctattctccactgtgtgtacagcccagctgactagagaggtcttccagatggagttcttttccaggactgcagccgcctctcccatccaagagaaaggcctgcatctcagaacaagagcagaagcctggtatgtctcagcacggagtggggtgagaggagatgataagcaggtgctcactccatagagccctcttgacatgcagtacgcagcgctgagctgggaggctccaagtgcactatcctgccgctcctgaccctgcctggccttcaggagcctctccaagaaccggcatggcagcttcctagagggagcttctccaccagtcctgccgcctatagaggcacagaccctggagagccacttgcacctcatcatttcatagatgacaacttgaaggcccagaaagccagagacatgcccaaggccacacagatgtcaggagcgagtagcaggctgaaatctggtttgcagcgaagttttctcacatagggcaggaatgcccagaagttcagactcagtagaaacgggttccctctttggccagctcctgcctgcctgcctgcagcaccacgtggctggaggtgatgacggtgaagctgtacaagggtcggttaccaaccaggtatccctctgccactggcaccgctctgcaggggcagggacagctgggcagagagcaggagcctccagtgcagccgtggggctggccacattcacaggggccactgtctcagctttgcactccgccaggtccacagtgagaagggaccgagcagctgtctggggctgcagcctggaggcggtggctgctgctccctcctgccacatcctcagaagggctttctaggtgcccactgtttaaacctggatctgctggcccccagagtctgcattcttagccaagcatcttgcaggaggcaggtgggaagggaatacacacagtgctgtatttcccttaggggatagctctcctagtctttaggactcacctaccagagtggatttgaggctgtcccagccattttctgggcagcaggggcctggccatctcatgcaggaccaccagagaaagttcctcaaggggcccttttccttcctcaccagctcggggtgctcaggaccaggattaatgacccacccatctcttttgggggcctctgctcagtggcactgagcttggactggccctggatcagccccaggagatgggggtggcataggattgtcccaggggctgtggattctccttcatctgaactctcaaatgcagacaaaccaggataatgacctgattctactctgtcctggctccagccccagcctgaataccagaaacaacaacaagtcggtggctctcagaattggcaccccggggtctgggagccaccgcacttctggtgggggctggcattctctctactaagtccaaccaggagcccctcagttttagcttcgtcctattagaattcacttttgaaacactaggataagacgttactacctgatactgacatacataaaactttttagaaagaagagttctaagtggaagtactatctcctttctggcactggcactttacaaaaccagagtaaaatctgtctgaagcactgatgacaaaggacagggtgatacctgcgttgctggttcctgtgagacatttaggctgacatgtgacacagactcacaaaatgcaatgtcactcccttcggttttgaaataaagtagccctatgaccgaccacgctgtacctattctttgttcagaaagttctggagtggtcactggctaaaagcaatctaattcccggctgtgaatcacatgccgatggtctcccacctttgagcctggtctcagcacagcactgtgtgtgttgtggtgcttactttatgctgaaggggctggccgcccttcctgacagcccgggctgtggcagtaggcagggctccctcccacaagctcagggcctgcgggaaggggaagggatccacaggacaccatgtggggacttcaagtaacatttcacagctgctatttcgcccaccctccagtagccccatgaggccatcacttgctgcccgttttgcagatgacagactggaggcccagccaggctgagctgctgtcaggactgtgctttccagaactaagttctgggcttgtccctgtcctgtccacagggcatcatcctcaggggagagacagaaatggcctagggaacagggagagtctgccctctccctaccctccacctcagagtcccaaaccaccaggctctgccgggcccaagatgagcccgtaggtgaccacagaccctgtaatccatcctgcaccatcaaccttgtctgggcccagtgctacatcaatgccaggctttcctgaccccagtgatgggccagtgcagacaccctgggtttcttcaagggacgtttggctctgggatttaatactcaccctacccagaggagtataggaaacatgggtgaagcactttagggtctccacattgataaagtaaaataaagagcaggagatatgcttccagagttcctgaggttggcaagggtgtgtaacataaataaagacgggtgagcctctctccctcccgctggagacactcctagggtctaaggggagctctaccccttgtacactgcttgggtgaggccaggagagtctcactgcagggcctcagccgctgggaccctcacttctttaaagtgtgccaaagagtgtgctggactacgggtcaggggcagacatgatgagacatccaccacacccagaggaagtcctgaactgccagcacaccctgctgctctcaaatagcctgacatctgttcccagcctttagaatctcagtgttacgatggtcctaacaaactgttaatgactttgccagaaaaagagaaagaagaagaaattaaaagcaatcaccaaacccaagcaactagaggtcttaacattggttttcagtccctaaagttggaaaacacaaatagcctccttagcgggagcaccctgtggccagcatcacattgagaacttgacctggccaggcacggtggctcacgcctataatcccagcactttgggaggctgaggtcgggggatcacttgagcccaggagttcaagaccagtctgggcaacatggcaagaccctgtctctactaaaaatacaaaaattagccaggcgtggtggtgggagcctgtagtcccagctacttgggagactgaggatgtggtgagcagagatgatgccactgcactccagcctgggtgacagagtaaaccctcaaaaaaataaaataaagaataaaaaacaataaaactttttttattttttaaaaaatttaaaaaaacttttaataaaaaatattttaacttttaaaaaataaaaataaaatttgattcctgttaaaagaaaaaaaaaaagggaactggacactggaccctgccccttccaacagccctccaggtcaggcacagttcttattcccattttacagatgcagccgctgagcctctgaggatccatgggctgggcggtggcattcgattttccctcctcagattccatcctcctgagtcacacagatcccatgacatctgacaatccaaggccactgctgatttctacaccaataaaatgtgactgctgtgtggcttaggctgtggggagggagagctgtatctgactcaggagaggggaagctccgctcctactctgccccttgcccccttccctaggcaggcagccctgcagaggtcagctccaggcggctgccaggcaggaaggggccactctggcagcttaaaaggagctagcagaaacgcgaactttggaggatttgaggaaggaacacaaccagaatattggagctgcaactgctgtgggcttgcttccttttaggattatggggctggcagaagacaaggacctccctaaaatctttcaacaccacagatgttccaaccaccacagagaagaaagcggtggcttgggcttgctgtaaatacaattctgggatggagcagagggctgtggttctgtggggcggattctgggatggagcagagggctgtggttctgtggggcggattctgggatggagcagagggctgtggttctgtggggcagacgcctctccctacaaaagggagcacgtgtgggcgggaatgggggggggcactactccaccctcaggggacccagaaaccagtgcagggggcccagagcctgaacacctgcacgcaaccaagggagtgaccagtgcagcagactccaggcagaacagaaaagaagggaaagaacacctgagaacaagccccttgccttattcagacttccagcttcctttagttaggggctagagaattcccaaggtggaacatcgcgaacgctctgccacggctactataggaaacagaaccacgtgcaaacacccagagggctgggggtaagcagtgagatggttccacagcagaacacctgtcagcgccaacacctgttgcttggacacccctacctgggggagcagagctggccacgaggggcaacgactttgttgtgaccgtaagaggtatgtgagggcacctgaaatgctttcttccaatggcttataaactgccctttgtggcagcggagccctctggtcaaagaatcccggctgaagtgggtgctggggtcctgccagcgtggccccctcccaccagagaatcgcggacacagtcctcatttaacaggtggggaaactgaggcctgctggggcccacagaggtcaaagtgattcatccaaggacagacacatgctaagtcgcaggcagagctaggaaggccactcatctgcgccgcctctgggacacaaccgatggtggccctaagccatctcaagtctacctcacccaggggaggcagctctggggttcaggagctccctgcccttcttcagaccccatgataggctaccgcaccccaaaagggtctgccaactagaaggcctcagctgtcccctttttcctagctccctggtgggggccctcaactctgcctgccatctgcaaggggctgccctgggcagcgcgtgaagccagcctgccacaggaagcggacaggagcaggggatgcggccatgcccttcctctcacccctgcgaactgagagatgtgggagactgacagagcatggaaacaggagagaaggcgggtgcacacagatggccagggagacggacggacagacaggcggtggttacctgtgggccgggacccatgggccccatgcctcggggagggttcattctctgcattgatcctcccatgttggggtggcctgcgtgagagaggaggcgcgtcatgggatggcaggagtggagggaggaggagcccctcctggcatccccagccaccctaggcccaccctgccctctctaccttgttgtcgtgtgggatccatagaattgggcagcaatggctgtgtcccaggaactcctcccggaggctgaaagagatgcaagacacaagctgaggagctgctccggagctgctggccatggggacaggcatctacctgtcccacccagtgccccgtgtgatcacgtggagccactcatggcctccctgagacttctgctgcctgccagtgggagaaggttaccccgggcctaccagtcagctggaagtggtgttagctataactgtggcgttgttttgggggctctgtgggagggaaaccaccgcctcatcctgctgtcttggggtagggggtctgtgtacctatcagagctctgaagtgaggcaggagaccaagttctctaggtcttgctctggctgtagcaccaaccaccttcctctcagaggcagcagtgcccactccctccttctgcccaaaccccatcttgcctttgtctcacagacacatacctcattttagctctacttccaaattacggggactgagacacccactacctaaaatcctatcgctgtgggaagccccatttaaaggggaaaagaggatgaggaggcttttaggattgagatggggaaactgaggtcacaggcctgcgggctcccagtcacaggttgcagagccaagtgagcacccaggtcacatcccatcagcttctacaataggaaatgccacccagccccggggcgggacaggtggccactaggagagggacaggtggccactaggagaggggcaggggtactagacgagaacccggctccagagctggggccatcggcggtgctggtgtggttactaatgagaaggtaaacacgggggccacgggtttcctgggtgaacacttgccccacccgctgtgaaaccctatgaaaagcaatttacttgagactgaagttatttcagctgcaactggaaaaagagagtaggagttgctggggggaagtttgcttctaggacctcatcccttagggctttataaatatgagcttttgccttcgagaggaaaagccttttggctggtcatctttcctcatctgcaggtgtcagtgctgatcaaaggctgggcatctgtgacaggggtctgtcctcaagggcccccagcccaggctgtgctgctgtgggggaggctgagtggggagctctcctgccttgagctcaatagtgaacttcaaaccggttttggaacgaggtggtggaaagcgaagggacagactgttcactgatttccctagcttcagaatggaacaggggagcgggtatgtgtggttaaggtacgagaggattgtgtgagggcatagggagtatctgatgttcacgaagtagaattggtatttgtttttgttttttttttagtttttgtttttttttttttttaagacagggtcgcttgctctgttgcccaggttggaatgcagtagtgtgatcacagctcactgcagcctcgaactcccaggttcaagcaatcctcctgcctcagccatcccaagagctgggactacaggcacgcgctgtcacacccggctaatttttaaattttttgtattgatggggtctcactatgttgcctgggctcgtatcaaactcctaggctcaagtgatcctcctgcctcagcctcccaaaatgctgggattacaggtgtgagcctccgcacctggcctacaaagtggcatttagcacctgctgtttccgtctgcctgggggtgctcagcgtctgtctttccaatccctggatttttagttgttccggcctctcactttctcccagccctgcttcctggccccaggttccctagctctgaatcacttggctggtttgcgtctgcccactgggggtttgtggtttttatagagtcctggtgactcaggaaggcctgcctctaaggctgtctggactgggggatcccaggacatggaggtggatgggggaccttcagggtcatgagtcacccagtgcaggaccaccccatccaacccagacagtgcagccatggggcttggcagtcactctctccaggtagcccaatgctgaccaccaattcttggagaaagctcctccttggattcctctaaccctcctatgtgtcggaactccaggagcaaagctgggctgttcagaggctcagaggggacctggaggtcgcgtccctcactgaggtgaccctgagacagggacagacagtctgggcctcttctatcaggggaagaaggtgtgcaatgaccaaggaaaggggtctcaaactaagagggctgaagccctcaaacttaaggaggaaaaacaacggctcatatatgggaccataattacacgctgtgcacacacccctggggcctacaggggagcgagttgctctggggcttctggacggaggccagctcttctcctacagcactgcatgtggggcaaggcacaggaagcatctgcccaggaaacggacaaatccctgctgcatccgcatgctctctcacctgccccgccagcacagccagcctgccaggtgggacctctgccgagatgtgtgtgggagagctctctgacaaccctggattccagccactctctcctaaacccggctgaactccactgtcaccacccatccaatcacccgcacttgaaaaaacagcaactctctatgcacagcctctagccagggaggcagatgggaggcaggcctcgtaagaccctgaggccacatcactgaccctttgcttcttgtttccctaagggcccttttcactcccctcacccaaaaggcacattcataatggcctgtgagccccagcaagtcctctagtctcggctccctttacccgtcacaggagagaactgagctaactcgggtggcacagggcttctgttaactggcagacccaacgagggcactcttcaagaaagccccagggtcaatacctgtggaaggggcacatccctctttggaggatagaaatttcttgaggtcacaggaaactggaaaaccagtgtggatttctttttttatcttttttcttctttttttttgaggcggagtctcgctctgtcacccaagctggagtgcaatggcgcaatctcggctcactgcagcctccgactcctaggtcccagcgattctcctgcctcagcctcctgggtagctgggattacaggcacacgccagcatgcctggctaatttttggatttttagtagagacagggtttcaccatgttggccaggccagtctcgaactcctgatcaagtgatccacccgcctgagcctcccaaagtgctagcattataagcgtgagtcactgcgcccagccccagtgtagatttctattgcgggggggcgggggggggggtggttggcagggaggttgggaaaactggtgtgtaatacaaagtacagatgatggatttatcccccatttgctcttgagtggttgctcatgcttagttgctgagtagaaatatacacacccctctccatatcctttaattgccagaagaagggccaccacaattatgataaggaagtagctcctttcttcctggcagaggccagtttggaccaagaagagctcctgggtgggaaggctgctgctggcgcccctatgtgccacggcaaagcaggcccagcggtgatgggttaaaaacacagatgggggcaggaatcttacatctgtgaaaactgaggaaaggggtggagtagagtacaattagcactgggctggaaccaagatcaactccagcccagctcactttgggaagtcactcctccactctgaccttttgtttcctcatctgtgatgtatccagggatcccttcttttgctcaaaaagctgggtctctaattcctcttgtccaaatttgtccccttcatgtcagagaaaatagaaaatgaaggacttttggagagaaaaaaaaacaaaataaaaaggtgggaacccgataggcaatttagcattaaagctggagagctggccaggcacggtggctcacgcctgtaatcccaacactgtgggaggccaaggcaggcagatctcatgaagtcaggagtttgagaccagctggccaacatggtgaaagcctgtctctattataaatacaaaaattagccgggcatggtggcgcacacctgtaatcccagttacttgggtggctgaggcaggagaactgcttgaacccaggaggcggacggaggttgcagtgagcagagattgcaccactgcactccagcctgggagacagagcgagactccggttaaaaaaaaaaaaaagacaattggagacccctggtaatgagcatctctccatagtccctgcatcacctcactcaggagccttcttgcagagccctgagaatgaaaagcatcacactcagacaatgctaatttagctggtgactaaactcccagttcaaaggcaacaagggctggatgtgctggcgcttctgtcagatttttttgaagggcttttgcaaagtcaccgaaataattctgttttaaaaaattggggcataaaatttccctgatgtttctcgaaaagtttcttttaagtctgtctatcctcaaaagaggcatctattcatatttacctctgcaactcctctcctgccctgaaccagggagggtggcatggggtctgatttctccagaccacctagaattgccaaccctaatgggccagcgtaaggcatatgaccccaggcaaaaatccctccccgtaatcagaccccttttctaattacacgaacaaatcctttcttgttttgagttgggtctgggaagcaggcagacattgctgaaaaactcacaaatctcctgctctgctgcatccaggctcctgatctaagcattcctacgggccatttccccccctaatagcaggattatatttaccagccttggcaattctcaaaagcttccaggaaaaaatgcacattgtcaattagcttcattaaggaggaagaccctcttccaagaagggggtagaagggaggggcagggcattaccatcttctctagaatagccgaaaccctgcaatcccagatgcgccttagctccatctgctgccaccttctgaactctggaatgggctgtccaaagggccatctggagaggcaggtgaactgccgcaccatgggcacagcggggacatggggccctctctggggaacagctagtaagctaccagccacgttaaacctgcccctccacccctcaatcctttccctcaactttcattttgtgtcaaagtccacctagggccaaggatggctgagggaggggagagagaacatgaaaaggtacagtacctggtttcccattctgatcgggggcctggggccgcctgcgtatcgcggtgacataaaaggctgcaattataggtaattagttcaatgacagcctgccctactgcacagtgacaaacacaaatgctctccactccacaaagtccagttttgttataactagtgatcttttaagttctttctcctgctagcctcttccctttgacagcaaaacttcctttgggcagagggaacaatagatccacacaacaaatgtgtctcttgactccacatttgttcgtggagatctactctgggtgggaagggcagcggctgggactttgcataagaaacgaaaaacagttaaatcaacgcagggcggaggaggaaacctctgctctcggtaagggcaaatgaaagggtaagaaggactgatacgtaacatcttaagggcctgcagacaaagctggacacacgagcacgcacacaggcacacgcacacagaaaccaccagcagggacagagaggggagcaaggactgggggggaaacgccaaggagacagcgggctccctaacttaatgcaggggaatggcaggaaagctttctcagcagcacgagtgcacaaagaaaaggctcgggatgcagcttcggttacaaacaaatggtgaaccaaactcaaaaccaaaccaaaagtgagagaggaaaaaacaaaaacgcaaaggcagctgacaaggtcacagaaatatatattttttccttttggtttcgtatccaagctgggtgtgatatccgaggactgaagactatctttagaaaaaagaaatttctaaaaaaatttaatttgtcaataaagactcgcaggcagtggctagagcacattttgatttttgtttttcctctgcgggctctctgcttcctccgcgccccgcgtccccggcgggcgggagcgccacggtgcgtttacctgactgtggggtcccatcatgctgctaggattgtgaggtggaggctgtgcgtgcggcgagggctgtgaccccggaggaccctgtgaggccagacagtagaggcaggttatagatcacagcacatggagaagcgcagaagcagcttaaaagaacaaaaattaaaccaaaacgaagggtgggcggcgggcgtgcgggggggtgggctctggttggtgggaggtggtggagctgctgctttggtcgccggctcaacggtgtaaaacggcgagcgggagcgagagaagctgataaatacattcacagggggttgaaagaacaaaaaatgaagcacctctgtcaaagcacacgggagtacagtcctggacacagcctacccttggagcggagtttgccatgttaaatacgttggttgagacgggctcagagggagtacaatgatgcacagacacagggacccaggtgcaaagcacgtaggtgccgcttgcacgggaggtggggaaagatcgggaagggccctgccctcaaggagctcacagtctgggggacagtgacacggctatgggtgactcgaggcagtactgatcaagtgtcagggagaggcccaggcgacgggtttcctgggggcaggagggccgggggcaccgacagataaacaacagaggcaagaggagcaaggggcaccacagatgtaacacacagggagtgaggggacagtgagtgagggccacacggtgtgggcagcacagactcgcacaccgtgaattcacctgcacttcaaagcagccctgtgaggcggggtttctcattccaatttttactgatgaggaatctaagtctcgagggatgaaggaacttggccatggccataaaactggtcagtggcagagctgggatgagaagccccatgggtccaaggcccatctccagccctgaaacccaagagttccggtgcagagctggggacagggggaagtgcatgaagggtggggaccccggactgctgggcgactgggtgggctatccttttcatacctcagttccaagctgacccccacccccaccgcctcaaccctgggctatgctgacctcgacccccctaccccgccccagaagacatgggcagatgaattcacttcaaccttggggttacaaactatgggtagaaactcactcagcaattcagcaagctgcaataattatctcttaaaaatccgaggtaataaaaaaaaaagtcagagagctttgtgtattttaaggcaggtgtctttcatgaaccccggttttgtgtgtaaatattcatgtgtgtgtagactgggtcacaccaccaaaggactctcctaccatgggtcacagtcagtaagcgcggagggctgcctcggaagcacgttccagcccacccagcgtgggatgctgatgccagggatgaggagacaggcctccattcgctcttccccacccatgactgtgctgttttttagaggttggtttttagaaaaattcaaaatgtgcacagggggtgagtgtggctaaattaaaaagagagaggagctgcctaggtagggtttcccccttggccttctcctgcagagccaggctgccagccgcctgcccactggggaggaggggcgtgggcccacagagaagaggtgtgcagagaacatcgcagggggctgtacaagaacccgagggcgccgccgctgtgaggcctgggagtttcttggccaagcgaggagctgctcacttccggaaagctccgaggagcagatgttcccctacctgccacgctactaatttcaacaagtgtgtgtctttctagcggctgccagcaacggcatggtttgttaccatgagcaattttcttaattaacagacattaattagccatttagcaattttgcaagcatttgtttagcggctttcccaaacatgaataccactgtgataatggcactgattagagggtcccctaattaacagtacagggaaggaaaattgaaatcacataaattaaaaagggaggggagttaatgaaggcgggacatatttgcacctgcaagtcttttgtaccacgtaacttgggtgtaatgtaaacaaaacaagataatttgaagccaacccccaaaaaaagaaatatgaaaagaacagaggaggaaggttcaagggtaaggtccagttgccaagagggggcaaaaggccttctgttggttcctcggctcttggcaagaagggagtgcctcctccctcgcgtccttcccttcctggtaactgagtgcttcctcagggcgagcagtggggctctgggcaagcccctcacacctgtgtgcccagtggtcagggagggcaggaggctggctcactgacagattagagaaaacagaagtgaagcacccaagggcgtgtggcgcacacggtggggcctcaatctacggcagcctttacaaaggaccagtgctccaaccggggtctgctgagatccagacagcaaggctggcaggtgtgcctcctctgcgcctccctcagaagcgcccctgggggactctggagaccagtccctggataagcagaggtggcacaagcttgctcttggcgcagctgcctcaagaaaaaaagctgacaagcagtaaggatggagccaggctggtcagggaggccccagcccagccccacaacctctctggctcatggggaacaagctgttaaatctggggcgggaagagcagctagaagtcttccctctgacttggagctaggggttggaatgatgaggaccaggaatcttggcccaggcctgccagtcactcagggagaaaaatgataccacattcttgacagaggccaagctaaaagctcagtgcccacctcctcagggcacagagctcctctcccacctgcagtgaagcgctgacaggctctgcctgcccacctctcggcacagagccagacgcctgccatttcccaacgggccacccacgtccacatccacagagaactcctctgtgtctctgctacctccactcagcccggagctccgtcactacgttccctgtgtctaggctgtgtccctaagaccctgtggcatcacaggaggaaccccacatagcctagcagtctcacgggcagagatccgtgtttgtggaagcatttgcttctgcaaggaacatgacagatgagctgcccatctctatgaggagtcaggggctctgctgccctgtgttttattaggccacaaaaagtgctctcgtcttccttcccagcctgcattctcaacaagagatccacaggtaggtttgaagaagacggactttgtgctcttttggatttgttacccactcgggcaaaaggctacacaggaggcagacaacaatgaaaaaggatctagattgagggctctgacctttggtgggacgggggccgctctcttccccgaactctgaacagacccagcaggcaggcagagtggactgtggtggaaggtgagaggaggagggagtctcaaagctgatgatactgatgtgcttttccatgcaggacatctctggtgaggcttccacttgctggaagcttttgaggaacccaaaatgggtgcatctggagggctgcttggccagcaggcccagctccatttagaacatctccctccatgagagctggatgccttcggttccagaggctgcctaattaaccttccagggatgcggtggatcagggcagatggcaccctgaaggtgtgcaaaatatcaggctagactagggtggctgggggtccttactagatgcttagggagaacggcatctgcccaggggtcacctgttaggtggctttgacagattctatcatcccttcctccaacatttgcaggggaggagaaaagagaggcccatgacagaggtgtgacctctccaagaccacagaaaactagttggcatctgaaccacatctcctaactctaccccagggctctcctcaaaacatcacattcccatttgcatctcttttagatgaagaaatagggtttggaaggaactgggttcgaatcctggctctgcccctgactgcatttccattttcttgacagtggaatggggccgtgagagtaacaataacagggagcgtggcctctacctacataagctcatctaatcccggactcctcgcagtaagggatcaattgccccattttattgccaaggaactgaggcttggaaagataaaggcactccaggattgcatagctattacgtggtggagccaggcctcgatgtctgattctagagtctaacagggtcctgggtagcccatcattctacaagactgcgagcagcacctccgtgtcatctgtcagggcagaaagcaaagggcaaagtggaatgaacccaaggctgaaggacttgggagagcaccgagatgccgggtgctgacctcctatgtggccagccagccccatgctggggtctggaggcacatcagacttgtcctgaccctgaggagctgccaggctaaggacaaaaacgattacacagagagaaataagcttaagtgttggcttaacctgccaggggctccaagagagggtgatgcctacctccctctcactcccagacaggtaaactgaggcccagtgtggccacagcatgtaggcctggtacccccatgagccaaccggaactgggatgagaactggggtccactgacgggtcagagctctttccactgcactgcactgcctctgcagggtgatggcagcaggaccaagccctggggtagacctcaacatgggggaaaatccccactcctgaatctgggaaaaggaggcaggaaacacgcccacttcctgtccagccttccagctgccctggaccctgttaatggactcgctattccatctcagctggccccaagatctctgagtggagacaactaactcccgcagtttcttgttattctttctcctgtaatttcagcactgggtagtgttccatccagcagctcctgagagccacttaggcagggcccaggaggctctgttatgggtgtgatcgaggcaaacactgggccacttcacgaaaactccgaagtgtggacactgatggttagtgaaaaagcctttacccacactgacagcgtggggagcagagcattcccactgtaaaacggattcaaggactctgcggaaaagcatttcagaagcatcagcaggacccccagccctcccgcacgctccggctaagtccctgcacttcatctgaagccgtcctggagaggcgggttgtggtgtgacaggaagcgcccacattatgcgggcctgggatccaatcccagctcctccggttcattcggagtccagtttcccaacggctctgagcctcactgccctcataaaggaaatgaggactattccacaaacactgcagggctgtggcacagctggcagtgtgaggcacacggggtccccagtcctggtccccatcctcctgctcctgtggccactcgcctgccctttacaaggaaagcaggagcttgacgtctggcctcatctcaccaggtctgctgaaggccacatatcctttttcatgaaggctttcctgctccagcccttcaagtgctctctaaacacagaacctttccttactccatgtctgggggtgccatgtggacccctccaggccaggccactcacccccacaggtaccttggggcagggcccaaacagagcagcagggctgaggcagcaggcgaccacactgccatgggcaaggggcaagacccagcaagccccggggcaggcacatctaacaccttggggctcataggaaccaggaagaaaagttagtaccaaaagggtgaccaagttggtcttctgagctaaagattcttggagctggatggaagatagctccttaaaaccaaaaccaaaaccaaaacaaaaacaaaaacaaaagcaaaacgaacaggctgggcacatggcttacacctgtaatccagcattttgggaggccgaggcaggaggattgcttgagcccaggagtttgagaccagcctgggcagtatggcaaaactccgtctctacaaaaaaatacaaaagctagccaggtgtggtggtgtgcgcctgtggccccagttactcaggagacagaggtgggaggatcccttgagccagggaggtggaggctgcagtcagctgtgatcatgccactgcactctagcctgggtgacggtgagacctgcctaaaaaaacgaaacaaaacaaaaccaaaccaagaacaaaataaacctacaccgattttttaaaggagaaaataagctatgtgttaagtattccccaaactcactgcttcttccccaaatgccacccatattcctcaaatctgcctacacctgtctagaagtcatgggcttgctgagaaataaagctgagactcaagtcctggctctgtgggttcagaggcatgcctgggaggcgaagtgtgaggacaggctgtgacctgtgctgaaggcactggtcccaaaacccaaaaagcactagggctggagtcctggccttgtcgccctgggtcttggcagagcatccctcaagcgaggtggggagtataggctatgattctctcacgggtcacgaaagctgtgagagttctctgtaaactgctgacagctacccagacagacgccattaccacccagccaaatccgccttttgtcttcacagaaggctgctgaggaaaggggacttgaggttttaggttgttaagagataaaacactccacacatcctcgtccctcctgactcctaggacaccggccactgctctggagaggctgaaggagtgggttttctcgaccagcagtgggacgcagaggacctgcggtactggcggcctgtgtaatctgcctgttaggtgtgttgctttaattgagtgaatacaaaattacaataattatacacagcaaaaggcacttgatagacaatccaatttgctccttggtcccaaataccgacagaaaatggcgtaagctcagtctggggagaaggtcaaggtgtgctcaggtgccatggacatccggaatctgtcaccatggtctgcctcacccacagcccccaaggaaagggaagctgaccagatggggggaggaagggaaagcaagtcaattttacatgcagtctttggcggaaacgttatttcttcatttcaacccatgggaatgaacttggcatggcttggagaggggttgtgtgaagggtgtgggtgtgtgtgtgttatgtagggtgtgtatgtgtgtgtgtgtttacaggccagagctggggctgagacaccaacttgagggcagaaggtgactaagttgcccgcctgcacacccagcatgggcctggcacatgcacggtaggtgggtcctcagggggctgagctgggccacacagcagtggaataactgcccgggcttctgcgtggtccccgagagctcacagtcaggtggggctcctggctacccagcagaagagcccatgacaatcaatggccctttgtggggagaggacaaggagagggctgggtttagaggtctggcaatggtgtggaccatcttcctgggacggtggggaagttaccagttagagaaagcaggaatgtactgcatctccccttcatactcatctctgcataaataccagggatccttacagccaccaaggtccactccttgcaaaggtgagcaaatggttcattgatttccgtgtgagcaaaggccccagccgacctcccttcctcctagcagtctctccaaggagccagggcagcactgggcagacagcaagggttcagggtttgcaccattaggaatctggcttccctggacagccctgctgaggcgtgaacagggggcgctcagtgaaggctctgctcaccaggcatgaaactcacttgcctcctggcggaacagaatcagcaagtgatggtttcccaaacaaagggaggaaacatggcaaacgaaaagtataggcagcgtccaaaacctaacgcatagctcctccacacactgcttgccagcgcctctttctccagcgcctggactgcgactgccatgatacagatgggaagactgagcctcagagatgtgatctcattggttccaggtccaacctgcttcaaagtctaggctgggtccctcgcaccaagctgcataccagggcaaaggctggtcttggctgcagcacaaggaccccaagagcacagccaccaggctgagctacagtcaagtcagggtcaaactagcctgccacctgtttttataaattaagtttaattagaacacaatgtaaataaagttttattggaacacagtgcaaataaagttttgttggaacagagccacactcactcatgttctgtccacggctgcttacaaagacctgatggcccacaaagtctaagattatttcctagctgtcccttcacagaaaaagtctgcagacccctgagttagatgatggtcctcaagactgaagagggaaaaaagtggagtcttctgtaattctcaaggaaaaacaaaacagtgctacactttgattttaacctcacatttctcttgtaagacaaatgaagcaaaagttgaccccattttacaaagggggaaaactgaagtatagtgacattaaggcattaattatcagagccaagatgttatgcccctgaggacaaacagaatgagcactggccaggcatcagcacacctgaatttggctgtcacaccaacaccctccatgctcactaatcaatgagccctggtctcttggccactgctcccgaatacagtgatagtgcatcatcggaacacaaaacccagcgctcacgtccagctggctggtcacaaccctccttgctgatggtgtccccagtttcattcttgccacaatgctggggaagaagcccttccccttgtttgccagcacaaatattctgggagcttgaatcccagccttgagttcttttggcaggttcaaaccgtttggaccctttcctgtggtgtgaattcacaaagaattagatcctctggggtcatctcagccaggaaaaggctccacctcgaatggctgtggttgggaagggccaggatatgagacgtgactttgcctccagccactaaatgcttaaggagggctttcctgctggagattctccgtgtattccacatgtatccatacaacagggcactcttttcaagaacacagcccaatatccataacatatgtgcagagcccacctctatctggcagtcactctaactgggcactaggtcccagtaccctgagctaagtgccggagacacgtgaacaagcagtattctgcccttccctaaagagctccagactggccagtgagaccagggtgcaacactttaatagaggcagagataccagtgcactggggagtgagggagcagtgaccacagaacagtcacatttaggcaggacttgcagaatgaacaggtgtctcctggcagagaagaaaaggaaggggattctggaccgtgaggatggcatttatgcagcccaaaggcaggcctgggtgtggttctagaggacttcatgcacaagatggtggggatgggaccaccaggccaaggggaaggatactaacatttgggggcttgaccaaggaaatggcaatacgatctgtatcgtgggaatcacatatctattctgttcctttccaaagatgtttctataccctctctcaagttggagactaattattagattcccatctgtgagtggctccttccatcctacctgctgccccgctaagtcacatcccagccctgcacagccagctctctttattaaaaaaaaattaaagacagggtcttgctatgttgtccaggctggcctcaaactcctgagctcaagcaatcctcccacctcagcctcccaagcgggtgggactacaggcatgggccaccatgcccatctcccagccttctttaatgctggcacagaagctaggaatcctgtgccccacggggagagtccagacagcacccctctctctccctgacctctactggtgcaggagagacaagcctggagaggaagagatgggcccgggatccagacccactccagtcctctggaacatggggtgaacgtggccttgccaaactgatcctctccccccagaacagatttccttcagctctgaaaatggatagtgctgcaaagacacatcccacttctgcccgccggcctccgccaccgctcgccagcgctcaggctccactgttaatcatgacaacacagcgaaggtgatgtgcatattaagaaggcactgcctcatccacccagagaattcctgctccacttttaagctctccagacacacgggtgcacacagccttcctgccctgccccttcacccccgacagttataaaaagtaatgattcgtcatatccaactaggaaggggggctgcaaagccttggaaaccacaaatccagaatgcccctaattcaaccccaattgcccactgagcagaagagggctaagaacggaacagcaaagtctgccaagtttttccctttcagtcttgcagccccctggaaaactcggtagtttttcatgccttttcctccctgaggagcttggggaatggcccaagacctcttcctccttcctctgttaagatgaagcaacaggatggagcaggggaagaaccaggactctgggagacacagatgtgggaggtcgggcccacagtcacacgggcaggtgcaacaatacctggcaaacttgacggaaaatgagaagcagctctgtggtgctgctggaaaagccccagattcatggggcttggagctcggcctatagctccctctgaaactgacttatctcccttgtaaaatgtggtcaccctacctgcctcacagagaactgtctaactatcaggagtcaagtacttagttcagcccttaccaagggtagctcttaatacaccaagctgtggctcggaatctgccccgcctcgtggaatccttcaggaacctcctttctttggctcagccctccttattacctcacacagccttccttattagcccacggagctacccctcttgcctacaacacgtaagctgtcctaatctgagctgctcttggggttggaagcatgcccctcaacaagagaaactccacccaatgctgggtgctcttcagcaaactccaccagagtcatctggccctagaagtagtcccccatttcttttgcccccaaagcccttgacggcccagaagacaggggccaggtctcttctgctcaccactggactcttatatccacgctctctaacactgctgcatttacaggtggggacactatggtccaggaagggaaagctgcttcccaaaacagaccgaagttcctaagctcttggaccttttctacagctccagagtaagttccttgggattggctattacaattaatctagcgaatcggaacttagctagatacgcatgttggacataacttttttgaccttgggccaaggaaagggcaagactttgtcaaagtattcttgaataaaagtgacctgagagggaagaagcttcaagaaggggagaggagaaggctgcagcctatagaacaatccccagcagactgatggaggggcagaggccaggtctgagagccagcagctctggtgcttgccctgtggaacaacagctggtccaacagtggggtgagggtagcagggctagaccacaaagagctctgacttcattcttctaatgaaggggcaccactggtaggaagagcacctgacagaggagaatgagccacatgctcacctttggttagcctagcctaggtctgccctgtggacgatgattgtgtgggggccagaggctgccctacctcccaaccctgggagcacagcggggctgggcagaaagccgtggcttatgaatgtatgctgaaggaaggaatgaccagatgtcagcctctgggaaggagcacttgtcggatttcccatctgccattcattctgaccacacaccttatgctggtacaagtgttcatctcccagatgaaccagggagagctgcttctgctttacaggtggggaacgcaaactcaaatgatactcaggtgaaattcaccagtgacagaatgcaggcgcacaggtgaagacccagctccccaggtcagagctggtctccatcagactcatggtagcaagcccgggaggaaaagaatcagagggtcccagacacacaacacctgcctcccagcctcgacctcccccggcagctcctgtgcggtggagcagggcactaggagtcaaggtggcaggggctaagggaggtaaatcaggtggacaagatgaagggaagtaacgtgttaaagggccaaacagggcctggtgcttaggtgtgtcaaatatgttggtcaaactgaagggttaaacactaaaaagctagcggatctcaaaaatacccagaacctcttccacacatcaatgtcactaaggctgtgccatgcccctaagactccctcctggaaagaggagaaaccctgaggcagctcttgttcttgggtaaactgaaagacctgggcctctagaacagtacagtcccagacacgcctacaacaactctaaagtctcgagagccaacccagcacagacaccaggtggggcttcatacacatcatctcacggcattctcgcagccgacctaagatgtcaaggcctatcatcgcccccaattatcagatgaagcaactgaggttcagagaggtgaactgactttctcgaggaaacccatgtgcccacccaggctgtgtgacaccagaggccaccaggaagcatggatcaccttcacagaaggtgaaggagggatgggacccagcacctccctgtccaagacagaagggacagatgagctgactggcacgctgggagctccaggcttagctgctggtcaacacggatcctgaagcccagtcatctttccacagcagtaataataaaccattactgacatgaatgtagatttctgagtttcttctgagacagggtcttgctctgttgcccaggctggagtgcagtggtgtgatcgaggctcactgcagtatcaatctccagggctcaagccatcctcccacctcagcctccagagcagctgggactacaagcctatgcaacaaagtctcgctaattttttaatttttcttttgtagagacagggtctatgttgcccaggctggtttcaaactggctgcaagcgatcctcctgcctcggcctctcaaagtgctgggatttgcaggtatgagccaccacgtgtggcctgaatataggtttatatgtatagtcaatcctcaccacagctccaaaaaggacacggtaggatttgctgcgcgactgttcctacagcacagctgaggaaacagtgcctgaagaggctgggtcactgccaggatcacactgccagccaagtgcagggccatcgtgctccaaagaccctgttcacagccactctgcggcctccctgacggccgagctgggtgccctcccaaccccatgcctgtgctgcatacagacctggcacttcatgaagggtgtgcccctctaccccaccatgtccccagtctctttcccaccatttggtcttgagcaagaaacaagagacggggcttttctttcttttctttttctttttctttttttgagatagagtcttgctttgtcctctaggctggcatgcaatggtgtgatttcagctcactgcaacctctgcctcctgggttcaagcgattctcttgcctcagcctcccgaatagatgggattccagtcgcatgccaccatgcctggctaatttttctattttcaatacagacgaggtttcaccatgttggtcaggctggtctcgaactcccgacctcaggtgatctgcccaccttgacctccaaagtgctgggattataggcgtgagccaccatgcctagcctgagatggggcttttctgagagaaaagtttacaggatcacaggtgggcctggcctaggagcttcatggattctaaggccctctttgggagaggaagtgtttcagggagaggttgcctgggagttaacttaggcagaaacaggacatgaacctgaccccatactgtggttccctgcacttagaacagtgcctcacactgagctagatgctggaatggcctctgacccccagggcagtgcctgggcccagagcccagcccagactcccctgaaggggaggttcctcccactgtggcatgagcttactcagggggtctatcctgatccatgtcatgccgaggcgtgttattacaggattctgctggaattctcttcctcaaacctcttctgctacaagggctaaggaatttgaccttttttttaaaaaaaaaaaaagggagaaaaacctcagtacaatttgctgagaaggtaggtggggacaggagcaagagagtccacccctcagtcagctatgaagagacaaaacaaaaatactctccagccccgcaggggtctccactcccatccccctatgaaggacagaaggacctcgtgggggcagagggagcagccacggtacagtgctgggagaactgccgacctgcggcagagcagcttccaggcacagggaaaaatcactccattctaagaaaacgcaaagtaaaaactcaggtccaaaggagaaaggataaaccagcccaagctcttaataagcatgaggtgaacgcagctactgacacccatccttccagtatcagatccacagaagccagagattcgggagtcagtttacacccccagtgagggcttcgccaggagcagcagcaagaacagagcccaggcctcccaagtccaagaggccagagactccttcccccttccctccctcaaaaggttgaagagaggagtgagagtcccatcctgcacttgggaggccaggaggacgtggtgtgtagcccagctgggctctgtagcatggggctggctctgcgttagggggcagtcaaggcccaagcagctgttgggtgctttgttaccgagcaaatctcccaggcgctgcctgctgatgcatagctaactgggcggcagacattgatttatgttcaactttccatttcatcagtgagagttacggcgctacatgtggagttcacgtttttcagagggggagggagaggcggctcaagtgtgcagacacaaacatatccacatgcgtgcacacaggcatgcgtgcacacaggcacgcacacaagtcagggccacaactttttttcctatttaagagggagggcgactgagctgagccagccgccgccgaggcagcctggcacgtcaggagtaaccttttgtccactgttgctaggagccccagtgccggtcatctgccgctgggcagacgtcaggcaccaggctggctgccgggcagggaagggagcacagcctgacctttgcaggggaggtgttggcaagcaaaaaaaggctttcttccctctcctctgccccaggcctcttttcactggccaggagattgtggagggcaggaccagcccggacccatgtgcttccaagtggccagcaccccccactggacagaggagcaagctaaggccaagagagagaaggctggctccccgaggacacacaggaatttggcagcagggctggtatcccagagtgtcccactcccaggatagggggcttcatcacagtaactagaggaggggctgccgctcccagagccaagtcagtttggaacaggtggggcctaggggtggggaagagcagtggttccccacctccaactgtggcctggagcccagcagttggggcgccccacctcctctctaatccttctcagcaggggtgaccctgccttctgtcagtctggaggcggacagcagggcggaggagctggagggggtggtgcttctgtcccctggaggagtgaacacatccacccctgacacagcacctctgtcctcttccccagtaggaggctgcatctatcagacagactccccccacctgcagggaagcagagagggccaggcgagacccagaatggggagggggttttatttccccacagacaggcagttatcaagaagctgcggatcccaccgccccacccaggcctgtcttcctgagcaactggccaatttgagcctcagtttctcatctatacagtgggaatgctattggttcttaggactatctcatagaatcaaatgaaatcacagcagggaacagcttttctgacttggagagtgcttccaccagcaactattaacataagagggtgtcagacagttctactctcaggcctgagagcactggctggggtgggtggggagggctaggctgggcagccccaggtaaggcgtctgctaagacagcaggcaccagccttggcttctcaccgtcacacctgcctcctgcccccaacctatgtgggcagtaagctgggcctcctttaggctccaacatccactagaggccaccagtcacaggcaggaaagctgccctcagtctcacccagccgccactcctgctcgggccatggccacctccagaggggaccgcagctggactccacactggccagccggccaagggcccagcccctccaggccatggaacctcttcctgggatcgcgttgctccccttattaggaacctttcatggctctccccaactttaagtccttcctgtgtctattcctggctccatccccacaccccagcctgcagtccaggcccctgccaccccaaacttgccccatcacatcctggcacaggctccctctcgcctggcacactcccccacctcaattcactgccaattgcctcctcctcctcagcccaaatgtcaccccctcggagaggcttccccagacaagccatactggctgtgccctgtgcctggccccaacggtattcttcctgtcaacctctccagcgtggcactcagtcactgcctgccccctccaccagactatgagccccttgagggcagggtccgtggctgcctcttgggtggctgacaggtccctgcccttacacaccacgtctgaccgaggggctaagggacgaccaagcaagcccgtccgggtctcacatgacggggactcagctccttcccttgccctgccttcacttcaccatctgtcagatgggtggggaccccagcgccccgccaccaagcttccactagtaacaggcttcggaaaccaaaagcaaacaaggtggtttaattcttcccaagtctccccttgtcacaaacttgtcctcgtcagcaaagagaggcctttcctgctgcagcagctttctggcaggaggaatgtccgctccctctgctggctcctgcttcccgctggagagcagggcaggaaatggacagcatttggctcagcttttgggaactgccccagttgctgccaggggtatgttctcatttactgggctttgaccctccctgtgaacacatcacccaccccacagctcacagtgcccaaggctctccactgggcatcctgccactgcttagttaccaccactgtcaaacagctcaccacttcatcattaatttggcagatgacagaaatgtcttccatacaatgattcaaattggcttcccttttctctcaaggacttggaatgtggggctgagagctcacaggggcatgtctgagtacatggcaggttctccgtaacagaacttcagatacttcaagacagccatcagagccctcaggaggctgcccttctcccagagaaaccccagctacttctgcaggagatggggaaagattttgggtcatgcaagtttctctcccctcttattgtctgggtcatatctccggcttttgggctacacacattgtttgctctttctcgttctctccccataaccaatgggaagagttctctagggacctcaacatctttctaaggctggtgggcctggctggcaggaatgaggactcaacggaaaggggatgtgtcaaatactccctactatccttcaccaaggtggaaagtccctgctatccttcaccaagatggcaagtatctagatgttcaaagcaggatgagctaagcttttggcaacaggagctgggacccctcctccaggacttttccagagaaggcagtctttaaccctgtgacctctgctgggtctctgtcacgcagcatccatcatcaagatggtcagctacttcctggccgggcgtggtggctcaggcctgtaatcccagcctgaggaggctgaggtgggcggatcacttgaggtcaggaattcgagaccggcctggccagcatggtgaaaccccatctctactaaaaatacaaaaattagccgggcatggtggtgagcgcctgtaatcccagctactcaggaggctttggcaggagaatcacttgaacccgggaggcggaggttgcagtgagccgagatcgccactgccctccagcctgggtgacagagtgagactctgtctcaaaaaaaaaaaaaaaaaaaaaaaaaggtgtcagctactttctgagcattggccacagtgctcaagtccccgtctccacgaagccactggaacaactgcagagtaactgttgtggaacacagatctggccaagacattatccagcccagagtgctgccctggcttcccactgcccactggatcaagcccatactcaacaaggtccttcaacaattgcccggcaacctctccagcctcatctcccgctgagcacctgtcaaccacctcattctagacaccatctcagccagggctgcactgcctccaggaatgccctcctgatttctcagcttggcagacaggcctctcctgtgtcctgccacaggggatgggttacctgtcagtctctctgctaggctggctgctcctgtgggcagactatggttgattcagttcgagcctggaaccaagccccatgccttgcatatcagagacggtcaatgacagtcataaccacagtcctttctccttctgtgacttcatctccccatctataaatgagaagcttggactacatcagggatggcaaagaggatatgtaccaccaccgacacattcacgttcatggtagacattgccagtcactatctgttgagcctggacacacagcttcagaatcattctcacggtgttctcagcagccaccacacatcaagcagagctggcatttgaatggggacttctttgctacttctttagataagagttatggtttctctatctcctttcggtctctccctccttttatctaattctctactctccctgcttccgccatccaatcagatgtgcatccacatttggactttggagtgtttgtggaagagcaccccatgaggaaccaggaaagctgggtttagactctgattacagcccctggttaacttggggcaagtcattcacctttctgagtctcactttcccaatctgcatgccttctctgcagaaacactgtgatgaaaatgaaagtaagttgcatgtttaaaaacactatgtaactgaaaacaactattggaatttaaaaacaaaacaagaagaaaaacagcctgtacccaatgctcagttctctatgacccctgccctcttgtgagtcccgttttggacttagaaatccttactggacagtgccctccttaggaccaccttagggccaaggaacttagaaattcttactggacagtgtcccccttaagggggaactagggaacccacccagatcagtgaggctggccaaagccaagctgggtttgccagatgtgcagcccaaccgagctaagctgcgtggaaaaaaaaaatgccactgcttgattatgtaaaatccatctggatccaaagcagaaaatcaaagttggaagggccctcagagaccacctggtccagcctgctccatctactggtgagaaaactagggtccagagatggggagcaacttgcccaaggtcactcagcaagtatgcggccaagtcctctctgtccttccctgctgcaaaacaccagaacaccactcctgaactcccaagctggcttcctgttaggccctccctgatcagaatgttggatctagtgctttggggctgcctgggctcctgttctgtaatgtgagcaatacaaataaactcagttcaaacatttactaggtccttagtatatgccaggtgctggggatgccaatattagggctttttttttttttaaaggtgaggtgtggtcaggtcagtttccaagccatctccctgccagcccttaacttgctaccagagacatctcatgccacgggaccagacaggtactgcccgccttggaaacctggacgtggaagaagagaaagctgatggccaaccctcattgtgggtggccaaaacttctgaccccaggagctgaagcctggcagtcagaggcctgcagaagcaaggccctgtgttgcttaccgaggggctgggatggaggtgggcagctgctctctcccacccaaccctggaggcctggggcttctacatttaggaccaggctaggggtgaagtcctgacctgaaaactgggctggccaccctaggccagggtctggccatagctggctcagccatcccaagccgactccctggtgcaaagcctttctgcagcagagcttcctacccaggccttggccaagcaggggaaggagtgcaattgttggtaacagataaaatcctcgataccatctctatttcccttctaatatcagagtggccggctgcaatactagtgaagggcagggccagcaatcaatagctaatattcctgttgtaagcaggcctactccggaaatgggcagccagtacctccttccagagagataccctttccccttggcagtgtcccagcctgagcggttcagcatcatggccaggaaggatcaggccaggtacctggcctagcccatccccctgcatctgactgatggggaaatgatgccgggaagtgagagaaaggaatcacccaacgtcacccaggaagcagagaggccaagacattgctctctgctgtctactggatgaccacgtcagctcttgatggctcgccgtgcctgggaaaacagaggtgacctcaagtcaagaaggtccaaaagttacctctgtttgatggtggctagtaatggctaaataaggacaggaatcagtcttggctttctgaccacacaccccaaacgtcacaggggagggcccaagaagtatgtctggaattaggccttagccatggacgattataccaaagcaggaagttgggagctgcccacagatcaggcagacctgagccttgtcctagacccaggccaaaatagaagccaatggcctatttttaaaacatacaactaggtattgtctacctctttctaccacagtggtctaatctgcaccggacacccagatgccggcaagcagcctcaatcaggaggcacacagatgaagcatggtacctcggtgggtccaccagacacggaagccacatctgcactgtctcaagaacatccatggcatgtgagcctagaaagaattcccaactggacagaacgccagtgggaaaggcccgctgatgggtgcagggcgccatctgcagcagccaggaagatgcctgccttggtgaggatgaacctctcacacgctggcctcttggatttcctccctgggagaaggacagcagcccctctggctactgcctttcttgggtccatgagtttccagtattttaaggtctaactctcaacccatctttaatatgtctgcagccttgccccaagctgagaccctagcaatgcctggtccagtccaacctggagctcacacacctatttctggggctacactcatctccaccccttggacaaggctccagttttggcagtgttctgggaatgcatacagatccacatgtggccatccaatgccccggatggccatcctgcatccctctctctcctcccaccaccatcatgtgacctaccacttctgtttttggggaacacctgaatttcactgccgtccttcttagctggtgagcagcatgtcccagccctcttctctcaggagttaacaccaaccgaaatacaaaatcttgccaactagaatcatcttccagatcatctctcacctagagggaaacccctttaacatccctaggagacgtttgtcaggtctttgcttagacatctctagggccagagagccccctgccttgatgtggtgtgagcacaggtgctaaattctggcctataccaagcaaaagtgtccttggactttgcctcactggtcctagttctgaattctagggctgtacagaggaaatttctgcctccttttccacacaacagctctttccatgttcttatctgggagtgccaatctttcaaaaggtgtggagaactcgggcggattctcaaactcagctgccgacaggcttgaaagaacgagagatgttatgatcgagagtgtcatcataaaagttccttacagccctgcacgctgtacctctctaagatggcattccccagtctcaagttggcttaaatcacatgaaccgccgaggagaaggtagagacagaggaggcggcgcagagagggtggcagccgcgcccaacctggcaaaacagaaagcccaatttcacacaccccagaaaaagccaaacaaggtgtctcttggagaaggccagactctcgacccacgtgggatctgttcctgcctgtggcgggcagagcacgggcacagatgcttgtgggatgctgtctgtgatcacactcggaaaaaatcaagtggttaaccagagggaaaggattctgagacctgccaggatggtgggtttttgtgtttttttaagattacgcctaaggtttgtcatttggacaagtaaagtaaacaatgacaaaagcagcagcaacaaaacagaaacaaagaacaatttactgattttttttaaagccttttgttaaaagaaagctccacagtggcctggaagtagcccccaccacctccctggccaggggcagactgtgtcgcgcctacgaagctggcatgaagaaagcaaactccagcagaagtgcaggcaatgcaggaggtttctgctttcccatctttttctccctctcagcttttagaaggactgttgaaagggatgggaagggaaggatttgaaccagcataaagcaactgtatttagaccatggcaaactgagctacttacttctctcccgccctcccacctgcccagggcctcggcctggaatacaaggtggagcacaagacccacgggccccgcacgtacctgaaagaaacctggcgggatggggcctcccggcatcccatcgttggggggaatgttgccaagcacggggctcggggcagctgctgcactctgtggagacaacaaggcagagagttagtggccaaacccacaaccagagacacagagttctgacccctggacttggctctccctgtccgtccacattccccgtggaccttcctcacaggccactttctacttaaagccctcctagcgtcccagggaagtgtcatgttcccactgacaggacacaagtagggcttatacactcagacctggactcaattcccaggtccggcccccactgagcaagcaacgaattccgaggctctttttcctcatctctaaaatgggagggccggatgtggtggctcacaactaaaatcccagcactttgggaggttgaggctggagaatcgcttgagcccaggagttcgagaccggcgcgggcaacatagggagaccccgtccctacaaaaaataaaaaattagctgggtgcagtggcatacgcctgtagttccacttactcgggaggttgaggtcagaggatcgcttgagcccaaaaggttcagccctatctcaaataataataataataataataataataataaaaaaatggggggacaatgtccaccattcagggaggttgcaaggacagcctgagacaaagtgccaaaggtacttcctgcggtgcagagcaggggtgcatggccaatgtgctgctcctggcattatatggccctgggccgtgtctgcccagctactctgagaagctcttggcaggccagtgatttataaatttctgtgccctctgcaagtggctggcatgtcatatagagcaaaagatcaataaatatccatgactcaacgaataaatgaacagaccaactgggaaacactgctggagagggtgacggagggcagagcgtgttcttggccctgcagggtcctaggtgtctcatgagagagaggggcctcgcgaagtggggggaccgtcattccttttctctttaaacactgctgttctggcatttgcctggtatatctgcctcaacaaatgcctcccaggggtgagcagacattgctctccccagcctggcctccttccaaaggatctgtgtgcaacctattcaggtggtcggcgcgtctgtgcctggccccgtgctcacacaggcggggcggggcgaggctgagacatctgggccccagccctgaggaagccacaggtctgacagtcctacctggaaccgggccctgctccttcccactgattctaggccttcaggggctccttctacaggaagcccacctccaaccttggtggtccccaaaccccaccatgactgagaaagtgaaacttggtcatcaatcatctcccagggttctgattctctgaaagaggaatgagccccttggggtcaggaaacagaacgccttttttcctcttagaaacacagcctcccatcaccaccttcaagaagtcactctctttcctttcattggcagtaaaataggaaccagaggctgggcgtggtggctcactcctgtaaccccgacactttgggaggccaaggtgggcggatcacctgaggtcaggagtttgagaccagcctggccaaaatggcaaaaccccatctcaactaaaaatacaaaaattagctggatgtggtggtgggcgcctgcaatcccagctactcgggaggctgaggcaggagaattcacttgaactcaggaggcagaggttgcagtgagccaagattgcaccactgcactccagcctggatgacaaaagcaaaactccccatctcataaaaaaaaaaaaaaaaaaaggaaccagaatctctaacttccaactttgatgaaaggaaatgaggtaatgtgcaaatctcactaatatactgcatgcaacaaaataaacgaacagacctgggaacaaatgcacctggttttcagcactgtcacctctactactaagtgggatgactgtgggcaagccactcggactttctgaatttgcttcctgtaaaaaatgagatagctgttgtcccacgtcctcaccagggttgtgggggataaagtgacagaatgggctgtgttttgtaagctgggacagctctgtgaatctagcaacaaagaaatacagggaatacagtgggtgttgagcagaccccagatgaagagaatgggcaagccgcacgttacttttcaaaatgattctgcctacagaaaaacagccctctctgcaagagctatcctgctaaccatcctgtaatgtgtacaagtttcaagcatctccaaaaattaggattgtagatctccccatcccccaggtctgaggtcacaggcccctgccttgcccctgcccggcactatctgagatggggcctcgtgagggaatcgccagcttatccattagctgcattactgctggctgcattactgtttttctgtggtcagtggttctgtgaaaatggcaattttgtgattaacagccaacaattactcctcagcagcaagagcaaaaaactttttttaaaaatggggtaaggtaaacatccatctacatttttcttcaggttctttcagagactggtgttacatttaacaatttcattcttcttatgtaccattatttaaccacttttttttttttttttttttttttttaagacacagggtcttactatgttgcccaggctggcttcatgtgatcctcccacctcagcttcccaaagtgctggaattacaggcatgagccaccaccccccgcctattaaccaacgaaataacaggcattaaatctcagtgtctgctaatgtggcagttagtatccctttggtattcggtattctgagttacctcttaggtcattaccttttgaaatggtttgcattggccacttgtagatctaattttatggcaaatcattcatgtcctttgctatttgggtatttgattttttatatattgaggatctagactaagggtaagttataatttaaaaaaaaaattaaaattattattattataattagagacctagtccccaggctggagtgcagtggcccgatcattgcttactatggccccaaactcctaggctcaagggatcctcctgcctcagcttctcaggtagctgggaatacatgtgcacaccaccatacccagctaatttttaaaattttttgtagagattaggtctcactatgttgcccaggctggtcttgaactcctgccctcaagcaatcctgccacctcagcccccaaaagtgctagcattacaggtgtgaaccatcgtgtctggcctaaaaaaaaaattaaatgaaaacttgaacctacaagtactttgtcgccttatttatgaggctcttcactctaagatgttttcctatgagatcaggagtgagtcaatggttctaggaactgaaggtagtggatggtccacagttctttgaatgcaacggccagggtcaccatggttctagtaaatgcacggtgtaattctctgaaatgtggggtggaagatggagttttgctgttctccaatgaaggaggacaaaaaaccaagaccatgttagcattgactaaggggcaggaagctgaggagacgcctttatcatttaaagcttctcaagcagcaaaactaagtcgtcctgcagtgcttaaatttgtgccttgaattttgatagttattgctgttcttctttgattatgaagcaaacatgtgctcataacaaaaaactttaaaaagggcagaaaagtgtgaagaagaaaacgaaaagcagcaaccagtggtatagggcaacaaaagagttaagaggttgggaaaggctcagaaataacttgctcacaaaatctaaaccaaggtaccctccccccaaccacatctatgaacattacgctgaatccctgcaccaaccctcctgcagctcaacggcagcaggggctgtttctcctgtctctgagacccagcacaacgtgaggcatacagcaggtgtattagcaggatctagaatacgggtaagttatactttttaaaaaaaaaactttaaaattattattattataattagagacctggtccccaggctggaatgcagtggcccaatcatgattactacgtgtataattcagagacctgctcaaagctgaccgtccagagccaggcctttccagactgctaggaatcggcctccctctgtggtttccaactttgagctggagctccattaaggcgctcagcaaagcgtctcatgagttttccctaacaacacaaaaccaaaacccctgaaaacccccattattcactgaggcctacagcatgccagggctgcagtgggtgcatgggctagaagtcccccacggaagaagagagaaaagaacactggattcagaagctagagatctcctagctgggagcccacggacaggcccctttctcgttctgggactcagtttccccatgtgtccaatgatggtgttagaggagatgaccactaaggctcttcttccaagctgctctccccagctaagtctacacaccaaggggagctaggtctggaaacagcagctcttccatgaacaggacagcaaccctctttccagggcacctgggttttaactcttctctgttcattataggccattttgtgatcaaagattaaacactaccgagagacctgttatctgagcccacagataacagtgggtgacattgggttctaaccgcccaggccttccttcctcaccaatgcttatccactttttggactcaagaaagccaactcaaaccacccatgcagtttggtaacatgcactttaaaaaacaacaacaaaaacaacaaataaagctaatttaaaattcttttctaaacagcaaacaggccttaaacagggtgatgaggcccattccagccaggtgcctcctctaaacctacagtcaacttgaaaagcccgaagtgctttcccagagcactgcctgaagtttgccgttcacagccagggagacttgtgaagaggactgatcccacagctccatctctaaagagcagggtttcttgatgatcccaggatgggtacacagccatggggctcagggactacccctgcctctgccctatccatgctccaacgggacagacacatgccactgcaaccagagatcctcagcaatcccactccgtaaggacacctgaaaacctcaccaccagtcccaccctaggagatggatattccccctctaacctccagggtggagaagcagggttcaaacagggggcctcagagcggtgcttccaagagaaagcgccttggaagccaggctaaggaatggaactttctgctctgggcaatggcggagcggggggacatctactgccccacctcaccctgtgccgggcatagggacctttcatgctcactcaacaaatcccaataccaccagagtaccccaaattccaggagcaagtggacttgacgagtccccacattcccagaggcctctcatcccaccctgagagagaagcatctcagagtaggcaacagtgttgatgcttttccttcaagaagcaatggtccaggggcattccctgcaagatactatcttctggcctcatttcaagaaccccagctatcctcactcacaaactagcctgagacccccgctccaaccctctctttaaaattagttctaggcacaggaagctcctggaaaactgaataaaaacaaatgctcagagggaaatgtgggactcctgccaggtcggccaacccctcctgactgatttacaaggctgcaaaatggtactttgttctgcaaatcccctcccctccttgccccgccctaatactcaggccttggcgtgcagcagcttgggggccacatgcagaaccgcatgtgcagacgacttccttgactgaaactcaacacaggctgcgtggcccagggcccaaaacaccagggggtgggaggtgtgtgctgagggtggagccatgtgctcaaagctgggaaatggaggtcactcaagggagcttggggcactcctgtgatgactacatacagagggcaagtgagacaggaagcctccaagtgacgcctgtctggtggcctggggaaggagggagggagggatgctggcactggtttcagcaagacaggggcttctgtgcaaactatggagtaacccgggtccctctggggccaggtttcccagagggaatttcagcagcaacaacaaactaaagatataaatcaggaatggaagcgaccgggggaatgtcatcacccagatggaaaggccaagacagacagaactggggttcaaagaagggaaggggacaggaagaggattcctggtttcatatgcagaccacagaacagaatcagttttggagaacaggggctctaattgtgcagtttagagaaaacagagctgttgctacgtgaagaggcagaaccagctgacgttaaaaataggtttggatgacacacaggagtgacacaagatccctgccttcaaatagtcagggggccatcgtgtgggaggagggatggatgtgtctcccggcaccaatggacggccctgggtccaacagtagatgccccaagctacaaaaagcttcttggctgcctcagaagggggcgggctgtgataatttggggtcgctcccagcggagacatggcacaaaccatattaaaaaaggattgccataggacccaccaccgcctgggcctggggattattaagacaaaagagtcctgcactgagggtcccaggatcaggattccagctctggcggcaaaccacctactgtgtgatctgatcaggccttcctgccccgggccctggactccacacaaggcagctgatgtcctgctgctccagtgacactgtggatgtccaaggagctcttcagcaagcgacctgaaaagggccacgtatagacaacaaaagcctcaacctgtcagggccaggccatcagacccaaatgagggtggtcttgatacctgagcttattttactaagtcccagctcatgtctgccacctgggtatgaccctggaatgcaagaggggctggagaagtgcctgccttttcattttgatcccatacatcagcaggggtggggggggggagggtagtatttattccccaacatcgctgggaagatgtcatttctgttttcctggtaaggaaactgaggcacagagagctgtactatctcaaggtcaggcagctaagtggctctaacattagtccctctgtgcctccaccttttatcttgggttcaaaaaacaaaaccacagtccactctgggaggccaaggtgggcggatcacaaggtcaggagatcgagaccatcctggctaacacgtgaaaccaagtctctactaaaaataccaaaaaaaatcagctgggtgtggtggcgggtgcctgtagtgccagctactcaggaggctgaggcaggagactcgcgtgaacccgggaggtggagcttgcagtgagccgagatcgtgccactgcactccagcctgggcgacagagctagactctgtctccaaaaaaaaaaaaaaaacaaaaaaacaaaaaaaaaaaacagtaatgtcccactcacccctgtagttcccaggaagagttctgtgtgctttgactcttatgaaaagaaatagccggcacttcattaaacacatgagagaagcacaatccattcccgtgtttgagactgtctatatgtttttgtgcttccccaagtaggctgaccttctagctctgctctttctgacaaatacttcaatgagttggcattcaccaaggggtgtgtatgtgtgtgtctgcacacacatgtgtgtcaaggaatgcaagatcccactgaagagtctgttggatctaactggcaaattaccctgagaggaggagaaacaaggtggggggtggggtggggggctgtaaaaaggttcctagtgctttttacacatcagatgcatcagcaaacactcgcttctggggccacccagactgcgctgtgctcaccagagcagatgacaggttgcaggtctgccctgcaggtcaggaggatgcaaggagttgtggtgacagagaactgagggacaggcaaggtgctctgggcaggcgctgtgagcggggattagggggatcagggaggctttgtggaagagatggtacttgagctggggccttaaaggacggcaggactcgaggatgcaggaggtgatacaggggtgagagattatgctgtcattttaaccctccctgggcacagggcctcctgacagcctttccttagagagcaaatccctctaggacgccacccgccccctgcaccatctccagggtagggggtgggtgtggggcttgttcgctttccctcccccaggataggggggctcccccacaggcgaggagccagccacctagtcagagaaggctcactgtccccaggcggtcccttgtgacccagctcatggtgtggctcatccagtctctctccctccatccttccaacaatccacagtcactaccagaactcagaggctctgaggagtaaaggcacttgtccaaggtcacatggctggaaatgggcagaaccagaagtcaagcccagatctgctaaaaccacagccccagctcttggccacacctcagcttctctgatacaaatttcagaatcgacacttaaaagtggtcacctggaaacaggtcagggcccagtccttccattcaccaggggccaagtcctcaggcacctcactttaccttctgcacccctcatcatttgctaaggaagggagccccctaccctctgtggggggcatagggaacttaaacatgacccttaggtaaggtgcccagccagactcagccaaggtacgggttcagcaaccggcggcccagagccagagacacagctccaggtaaaggaccacgtgctgacgtcctaagattccctgaccacagcaggctggggatggggagacaaaaaggggctgaaagctgtggaaagacttggtcttctgagaaggggcctctctcttcttagtggccaccttaggaggaagtgaattccctgggctgggaagtctgaggccaccatactgccgggccctgcccattcatcccaggaagcacccggcttcttctggggactggatcaaaggtcactgtttggtaagaggtggagccccatgtatttaataattagtacctggtgagggagtggatcccagccagtgcaccctcctccacaggcagatacctcccatctgggccccatggcacaggacgcaggtcccaggcatgtgcatgcaagacaaggaagattaagggctagaggatcccccctagatgaacactgcagagtggatcaacagctcggtatttgtacaacgttgattttcttcttaaagagaaatgagcttcaggccctagtttacaccattagcaaaacacacacacacgcacacacacacatttcccactgtcttaaaggagctacttacaaccacaaacatgtcatagtaggccagtgacagctccttaacaagaacactggcagttgcttctgcaaagtggaaaattccctggcgtggacccgcgcacacgctcagttccaatgacaacttaatcctgccaggaccgaggtgtgcagagaacagaaaaccacccgcttctagaaactttttttttttaagtttaaaataaatcattaaaggcagggccctcagaacatctttcaaggatgggagcccacactctcctcagtgagcatcaaatttagtggggaccaagtcactttccctcacctcctctgctgtgacaggacaaaatgtacacagtctgacaagttcacccgggtcccccaatgccagggaaggggcgcataattcaaacccaacactgcctcttctgtgtaaatgaacagtcgggagcccttgagctccttggccaggagggaaggcagtgagcagtggaccaccgtggtctgcacagccaccccagcgcacagttgccacacgggttcggcgctgagcagatgccgtctaagcctttaaagcatgcactaattgcgctaatttagctaacagtctctgtttcgtcccccactctgagtcaaccagcgtcctttggtactgctggagagatgcaagctgttggctttagtgttattttgtcagccattaaacgattcatcagagtcattaattgatttattactgctgcctgctcagagggtttagcaaataaagaatgatgtaggtcacaaagcaaaggaaattggacccaacaacactacgaagcgctgggcacttattcgagtgtctgctgctgtccattcaggcagccctccacgcccagctgtcaggcaaggaatagcatagatggttctcctgcctgaaatccaggtgcgagcccgcatcctgctcaggcaccagtgctgccaatggggaaccttgtctggagcccctggaaggctgctctcgggcacctgctagatacagctgagaaggaagggagagaggcccacactgacccccttacccactaggtgggtgctgagtagcaatggctgggcctgcagctgggccctccagtgctctaggaagccaaggacagacccttcagccaagactctactcccctggaggtgacaagctccagctaggccctccctctttctcccctgcactgcctaagggagtgggaggaatgcaacagttggtgcatgccaggaaatggcagtcctgggattcaaacccaggtctacctgacttcaacatccacaattaattcccctctaccgaattcttcagactgacacaagagaggactatagcttggccttaacgaaaaccctgacagaaactagctaggtaaccaaaagcaaggcaaccccttcccttctcagagccccagatgcctcatgtacaaatgacagggtgggtgagcccccaagctacaggaagggatgagagtccaggccatgtcctctacggccccagctgccctggccactgtgaagcctcatgtcagttcccccaagaacactcctgtgttgtgagcgaggccctgcacaagccctctgaggacccctgctgcccttcaaaccccagactccagggcgcaggtccaggaaggtttgtcgcactcagaccagacagcggtgaccctcatcccaccccaatcccagccctcagggctctgaacaaacgagagggagtggtgccaaagcaagggaatgctaatgcctccaacaggagaattcaccaggacatgaattccgtgtgtgtgtatgtacatgtgtctgtctctggggcaggaagggtaatatctctggtacctgatacccctaggaaccaaaaacagccattctagataactcagattctggcatcacagttatcagcccctccacgaggcatcacatccctaccctgccaagtggccttctagaacagagcctggcatgctttcagaggagactcttggaggatggtgactggatggtttgctccaaaagtaatacagaggggatgaagagatggttcaggtacccaccaagaaccaacctgcttctgaccaagacacagccccagcctgcgaccccagtctgtggcctgctaaagtctggtgggagccacaaagctaaagggcaaggcggggctgccacttcggagctcactacagattatttgttgggcatctaccaggtgcacacagcagggctttcttgtttgcacccaccaagaagagggccagagcacccaagaacacacacatcgcttaggatcccggtgagagatctgctaagggggtggggcctgggaggatcggaggcacgcgggctggtcagaggcttctgaagggacatgggagttcatccactgagaattctgacccaaactcagcttctgaaacaaacacgggacttctcatagaggtggtccatcccctactcatgccacccatcgatatggtattgaaaacacaaaggaaggtctttacaaaacatttattggggtcccattcagagaagaataacctattattacttacacatatttagtacctagtaccagcttacaaaggcctttctttcacacatatttccttgatgaatacagcaaccaccctctgcacaggcaggttcctctctctgcaacactcttctcctctctactcaggcctgggtgataccctttcgtcatttatgtgtttctcagcacagtgtttgtcacacctgactgttaattccttattaaattagccagctatcttccagggatgggagcaggaatggtgtgcacagcacagggaagatgctggctcagtaaatattttttggataaataaaattcttgcagaaatcctgcttttcggccaggcatggtggctctcgcctgtaatcccagcactctgggaggctgaggcgggtggattacctgaggtcaggagtttgagaccaccctgaccaacatggtgaaaccccatctctactaaaaatacaaaaaaaattagccaggcgtggtggtgggcgcctgtaatcccagctactcgggaggctgaagtgggagaatcccttgaacccaggaggcggaggttgcagcagtgagccgagatcacgccactgcactccagctggggtgacagagtgagactccatctcaaaaaaaaaaaaaaaaaaaagaaagaaagaaagaaagaaagaaagaaagaaaagaaaaaagaaatcctgcttttcaagagtagtcaccaaatctaaaaggtcaaactctaagactagctatctccatcaccttccattaacttaccatttggctacatcctaacaactcgcccctcccctccaaataacaacaaacaaaacacacaccctgccacaaactgttccttctgcccgtaaagccctcacaaacgacttgggcaggccacatctcccagatccattggtcattaaaaatggaaatcacccttgtatcaccccctcccaagacaatgggaaagacaacttcagctagtgtctggggaaagcatttgtagctccaaggaaggacaaaagcaatgagagggagtggggtggcctcacagagctggggccctgttctcattcccacagtggaagaagacaagaccagcccagtgagctgggtgcaggaaggggttcaagtggcctctgtgggttactgagacctagtggcctctcccagtcctctcggccagcctcccttccatctccaagatgaagcctgctatttcttctcagacaggttggattccctggcctctctgaagacgagtgtctgctccactggcccagggagccactttcccataggctttggctgcccaccacttgtggggcccaaggacagcagaggaaaaaggggcttggacaaaagctgagaacagcagggtgtagggtaccaccctgcgataccttcctccacttccctgaaaatgcatcccacaagcagaggctcctccaccaaactagggactgtcccttacagctagaccctccaagccacagatttatagcagacatggtttttgcaatcagagacaaaccacagagcaagccctgagctcatgcgggaggaatccatcacccccagcctcccctccccgtcccttcctcagtccctcacttgacatgaaatgaaacttgagaggggcagagagaaggggagagcagagagaccaggatccctgcagctcactagggccccccggccgcatccctactctgccccacccctgtgctgatcacgtcctgggaatggctccagcccctaacagatcaagtctcaggtccctcaccactccctccatcccggtccatgtatctacctagagaactcccagttatccatcaatgcccagctcaaatgccccctgcttcctagtccaagtgggtactaaagtcccaagtaggttcatgagctggaactcaatactagaagttaccagtttccacccgtgtccctttcatgaggcatcccacggagcatgcaataccaatggcctcctaaccaagccgacacagcactggatttagggcaggagctccagctcttgggctccctgaccaattcagagaggcaggcaattcacctctgacttgagctgcaccctgtaatataggacaatctctgggttgacaagagattttaaaaaaacaaggagataatgaaagggctgtgatctcatctcagcctttcttctctgcctcccattccaacctcccccttttctcgtactctaagcttcagccacaggggacactagctggtccccagcctttgcacatgcccttctcccctccatctggaatgcccacctccctgctagtttctgccattctaacatatcccttaggctaccctggacacaaggcaggatgatttattcaccctccaatcctatatgagactctaccttgactcttccagcatttttctacctggtcttattatatagacaaaggttatctccctgcaggactgttggttccaaaaaagtggaatccaaatatttgtaatgcctactatcaataaacatcaaatgattggagactgcaaaggagctttctggacaaagctaggcctggttcttctgggacatttctcccttcttccttatttgtctgctttataaagatgtaactttaaggaacagaccagattttggtaagcccaaatgtcaaaaggtgcaaaaagcagccttaactcccaaaggttttcatgtctctcttctcctcaaacaactgttggaagagacaaacatgaaaacctctggagagatctgaatgtgaatgctggttccgttcctagcctgaaacttgcaagtcagagatagcaggaccattcttgacaaggtccctactttgctgcaaatctggcctaaggcagtctgtttttcttctatttttgtctaactccatttaaggccattgccatggtcctctctggccaagacaggaattattaatttaaatttgggccttcggtaactttgaatctacaacatagtacaggaaggagtcccacagccaggctggacagatgtggcctccggtccatacaccagcgtcaagggtggcaaaggtctggaatccggttttcccaagatgtctgtgccttggctgtgtcatctagaaaacgaggacaataagcactgcctgcctcacacgacttgtgagggtcaagtttctgctgcatcccctggaacagtgcctggcacgcatccatcaggtgctccagaaatacttgccaaatgggtattcattctaaaccctctctacctgttttccccaagggtggcctgtcccctggggaccagctgggtatcactctccggcagaccagactcccagagccttgccatccctgcccccaaagcctcctggctctctgtcccaggaacaataataagcccccacatcctaagactctatgtaggcaccaaaggaggctgatctcacttaatcctcccaacaatctcctgaggtgagtgaatccactcatttattttatatccgacctatcttgctggtgacacgaacagttaagtgtcttgcacaaggtcacagttaatggatgctgggattttcttcctggctggatccagacatcacaaactcacataccacccaccaccacctccagtgggaaccagaaggaagatttaagtaatggaagggaaagaccttaaccctgaatcaggtcctttgggtctggtaccaatttgggacaggagtccaacctgaatttgcctatctgtaaaaagagaagtcaccattccctgcctggcctacctcacaacagtggcatgaagcacaaatgaagaaacagacataaaaactgtctcaaggctgggtgtggtggctcacgcctgtaatcccggcactttgggaggccaaggcgggcggatcacttgaggtcaggaattcgagaccagcctggccaacatggtgaaacccccctctctactaaaaatacaaaaattagccgggcgtggtggtgcctgcctgtaatctcagctccttgggaagctgaggcaggagaatcgcttgaacttgggaggcagaggttgcagtgagccgagatcatgccactgcactccagcctgggagacagagtgagactttgtctcaaaaaacaaacaaaaaactgtctgagaacagaagggcaacgccaccatccccatcaccctggataatcaaaggagctgggaacaaagatgccacacaagagcactgggtgaggagtcaggcttggctggctgcccccagaaggcccttccctgtacccataaaacaaagggaatggattcacttcctggtttccaagcctggttgcacatcaaaatcatgtagtgagctttgcaacaactaagctgcctgtcttcctgagggggcagggatccagcttctgggagctcctggaccagatgttccatcagatccctcctcagttctgtctctaccctgaccccagcaggggaaacagatcccaggttctggggatggctgggccagatgcgcaggcctcttctgccccctcatgctccccaaccagtctcctaggaggcctgcaggaagcctccgggtgcaggtcagggcttcaacagctgcccaaacaggtatgggcccagatttaattggcctcttggttaagctttctaatctcattaaagctgcctccatcaagcagaccgaggctctgaattgaatcacagaagagcgctgccctgccccactgtaagctgattaggtctggggaggcctagctcggacccctctctgcactaccatgccgtacggtcacacggaaggcacgaacccagactcacgaagaggggcacactgacgagggggcagcaggaaggaagttcagcgaagcagtcccagcaagggtgtggtaccagacctgcctactcccaccactctggggagccagtgctgtccccaggattttcagtaaatacaaaccacagagtaatctgatttcctatcttatcagtgtgcagtgccagaggccacccggctccaggagaaagctgcccttctaggcagagcgtgggactcacaattacctctccaacttcttttcgtagctttagagctctacttcattcagatggaaaggaggcagcagaggggtgtggtgtggggcccaaacacctgctttccatctctagaagagaggacttgtcttgccactcactctctccctgaccccttccacctccacaaggagctacactgcggctcttctccgatccagctcctggacgtcagcttcaaaaacaccatggtcagcgtgtgcaaacagccctgagcaaatacgcgtcgcccacttctccatcatctcgctttatctaaatatatcccaaggaaataacttggcagtggtgagaaattctgcagaggctccaaagtaacaaaaacaaaacacacacacacacacacacacacacacacgagctctgttcaaggtgccacgctgagctgaggataggcatggagatacaaacactcacaaggaacagccacccagggtgtgctgggggttcagtcccactgagggttcgtgcttggttgttattaatatttaatagggaagacaatattttagaagagacaggactctgtgcaggttgcaggccaggctagcatagatgccctgtccaagggagatgttaagggggcacgcctagccaagtacacacacacacccatcccacaccctctgggacttgctgcaagacactggtattttccgctccacttgccaagaatggagccaccctgccctgcatgcttgatcctcaaactcctggaaacaaaggcggcagtcacgggggcgtgctagcacacctcaggcactggtccgatgttcccctaccctctgccattttcactaaaggggaaactaaggcccaaagcagaagacagacatgcccagaacctggccagggtccctcttactccaccacgctgtcgataatttggatagaggtggctttttttttttttaatgcattacacacatctaggctattcacaatcacccccaagcccacccttgtgggcacagggaaacaaattattaggaaaatgagagtcaaaggggctatgggcaatcccccaaatcatgccagctctcagcaggccggcccactttctcaggttccacacaaccaccccagtgtctgccttctccatctgccatctagacacggacatgaggcctggaccactacatcaggcccctcattagtttattagccttaatctacttctttctccaaacagatcaaacccagatcgctcacacggcaggctcacaacctgaggattttctgctccttgccacacaccagctcagccgaggccttcaggacctggcctgaaccaaccctcattcccagctccaccgacataattcctccttccctgaacactgcatgtctttttaagcttctatgcatttgtacagacttcccagacactggaatgctcctatcacagtcttccttctcagtcaccaataccagaactcaataatcagtgacaccatccaatcctagctatttaaagacaagaaaatggaaggccgagagagggtaagggagcgccacagaagataaggttagcagtgctggactcgtggctggccagagtcttcattgactccaaaagccctcaaagaccctctccaactcaacagccctacagcaagatcaaacccaggagagggccactgaggaccaaatatccaagaaagagggcccttagggagttctagaggcagcacaggaagagctggcctggggtctcaggaggccagcagaaacgagatgcatgcttgggcctggaagcccagagagtggagagtatcatcatgtcagttcagctcaggggcccagagcaggtgctcggggaggatgtgcagaacgaccaagaatggtacctggcacacggagacactcggtcaacatttgctgttgcacacattaatgacacaaatggccaatgacaaaccagtgcaacacagagtaccgcacaggcctgtactcagctccaggatcccaaagaaaggaaggattatttctgccggagggtggggcttcacagagcggtgacatctgatcagacaccatctgttatttttctctaattgttccacatgtgtgaaattttgattctcaagctagaacatagactctgagagggccaagaccatagctgctttctctgccttcacctactctgtctccaaaatgtccattccatggatgggctctcagtggatactgaaagaactccaaaaagagcaatggaccccattttttttatttcagagagaagggcaaagcaaaaagttgttttcccacaaatctgcgttaccttgaagaagttccctgaaccccatcaggaaatccactgatatccacgggcatttccaacatcccaaatgctctgtgcccctggtgtggcatttaagagatggacactcttaggatctcctgaatgcttcccacatctgacaggtggcactgggtctcctagacagcttatctatttcccccttcaacaaccctgcaggacaggaatcaacatccccacttgcttgggaaaactggggctcagagaggtcactcggcaaggttaggagaagacctgcatctcatcttttaccacatcacaatgcccataatattaattctctgccaacagttttccgcaacagaagcctcacctggaccatttggcaggaaggaattaatgcccattcagaatctcatcaacaataaagcggtgttgaagaccagcagcagcagcacgccaactttggttcaacagcacaagctaacctaaggggcacactgtaccaggtggtgctcactcatccggactgtgctgtaccctgagtttctgcagactgtgccccacttttgtgaggtctcaacaccccctacccatgcccagccacatccctgtttccatagaggcccagaagaatgcaaactccaattactccctttcttgtttggataatggccacttcacaactctccctcccacgcggggaccctcgcggctcctaaggcacataaccctgaagaggcgctcaggccagggagagaagaacaaatgggaagggggatgaaaaacacacacaacagtaagctccaacccaaacagaactaatccattcagagccaagcgaggctgagcagatgggaagccaggcatcccccacccacctgtccggccgccaccaccaccctaggttccggggccttcaccacagtgctacaattacaaagggtgacccagccacatgctcccggggccacccctgctcccaggcacccacaggctctgccttcatctggtttgggtttagaatcctacccaagcctcccccaaattatgtgtgcaaaggcaagaggaacacaaacaccccagccctatggcaccaatccctgggaaagaggaagacggaggcacgaactatgcaatcctctctggattctcctacagctccagagggcggctgggtgggggtgggggggtacccccattctttccagcctggtgcctgccactcccactcataccatcgtcccatgtgcgcaaggacaccttcattctgtgtctgtttgtgtgtcttcccctccagcctgtaagcaggaggacaggaacaggacaacctctcttcctcactgtagcacctaccccctgcccccggtgcttagttagtgcaggcaaggctgtgcaaaatgtattctaatacctgctcaatgaatgtagctcacgactctgagcataattttttttttttttttcctgagaaggagttttactctgtcacccaggctggaatgcagtggcgtgattactgcaacttccatctcccggttcaagtgattctcctgcctcagcctcccaagtagctaggattacaggcatgcaccaccacacctggctaattttgtattttttagtagagatggggtttcatcatgttggccaggttggtctcgtcttagcataatgttgatgtgtttattcctttaatatttgtttctttctctagcttttaagcaccctaagggcagaaataccacctgtcttatccatcattgcctccccagtaactgacacttagtgggcgctcaataaacatttgttgagcaaaggaataacaactcaccacttcgagaacactgacgtgatatcaaccagtggaggaatctccaccacattagaggatgttaaggctgcatgggggctcagaaaccacctgctcatttatgacaggagggagtatgacttgtttgcagctgcagaccaagtcagtgcggtcaatgcaggactcgaacccaggccctgatgccaggctcctgacacccagccatgccctggcagtgctaggccctactgggggagacaaaagacacaaaagatggtgcctgctgcttaggagaagcaggtgatctagcggggcagacgagacagacacgtgaaacaattagtgaacaagataactgccaggctagcggtattatatcctgatataataaagtacacgctgtacaacacaattagagacaagagcgaggcacaccgcgctaattacacagcacaaagggtgagctcacgggagccatggggtgctggtgctgccacagaaagctctggaggccaagagagcagagatgagcttggggtgggggcgcctctgccatgcagcctctcctgactacctctccctcctccttggtgctcctgctaccagtccctgtgctagatgatcccttttgacacttctgatgcctcgctgcccttgttcgggcagtttgttatcaaccccgcctagacagtcagcccagggggcagggggcaggccctggcaccaagccagcctctggctcattacttcaatgtaaacaatcacccgcatttcccctcactatgcactgggttccatgctgagcccttccttgcactcatcccgttcaatcctgacgacaactctatgaggtgcacataagctcggagggggaagtcacccacccaaggccacaatgcccataaacagcagtcaagaaactgcattaaacaggtccaccatgctacaaatctcgtgctcttaaatctttacactcacacggtcctgcatggaagccctagccacaagcagctaccaagtacttgaaatgtgggcggttcagagacgcaccataagcataaaatacgtaccagactgcaaaggcagtttgggggaaaaaaatataaaagatgtcattaatgatttttacactgatgacatcttacagtgctattttgaatatatttggtcataattaaagtatattactgtaactaatttcgcctatttctttttactttgttatgtggctacaaggagctctgaaataacctgcaaggccctcagtacatttctaccagacagcgctgctccacacagcactgcctccacgtgtttgcagaacgaatgatgggtagcacggagacagaggacaggagaccggagaaggtggcccttgtcaagtttcagacaaggggaaacttgaaccaagatgtggcaaagggggtactcctgagcctgtgcaggacaagggagccatgacgagttctgaacacaactggggagcacttgggtcgggcatgttggaaccaaacgacacaggatgaggacagcagggcagccttcgacctagagtctttggcaatgtgaacaggcggcgaggctgtttaccatgctgaaaagggagctgggaatgatgcctccatgagacaacagtggcctggaaccagtcacctagtgtccttccagaacatgacaacaatgcctcaatttcctgaattaaagagctcttggggggatgggggtggggaggggggctctcctccaaggaccagggcgtcttctgggcacagggctagctgcacgcagcaggagtgaaggggctccccagggaagagaagccaggtgaggctgagtagggagttgcaggtgatggtgggaaaaggacacagcaggctggagtgtggaagaacagataactctggcagaaggtccagttcctgcaaaggctgcatggggagcaggtggtaaaaggacagccacaggcagaggaggaacaaagcacagtccagcggggtcactggagccagaccccagaatgttttgctagacaaggaacactgctggtgcaaggctgagggttgagtttgtggatgctgtcagagaacagacaggtgcctcaccagtggaaacaacccagggccttgtaaaaagcctctcagctgtcctctgctgagatgagttggcctacgcagggtagctgctgagaaggcaatcacagataaacagagaaacacattctcagagcctggaagaccaccaccaccacccccaccgacaccatgaggaagcgaggatgcgtgggacccggagcggctcttagtggagcatgtgcactccaccagcatggctgaggctgtcctccacgccagctgagatttaccataaccagagaaaggccgagcagagaccatgtatgcctggcgggaggcgtggcgtgggaggccaggccaggggtaactaacttcagctttgccatcgctagctgagcaactctgggctctttcttaactaagtaagatggaaaccaccaccctttactgcccagggcctatgacgaggaataaagacattcagtagctgtgagtttctcagcacagacccaggccctgcccttcccaatatcactggtcctccaaatgcctcctttcccttttcacagcacctgcctagcacaccggccagcacatggtagggtttcgataaatagcaccattttctatgatgagacatcacagctgaggaaataccaacttagatccatctatggctggagttggagtttaggagagcagaaagttcacctaactgagcaatcacagagccagggaacattttcaaaatggaagaaagtttcaggctccaggccactggcttcctttgccagactgggcaattgggagctatggagaagccagggaacttgagtttggatgccatcatttagttatttttctttaaaaaaaaaaaaaaagagagagagagagagacgaggtctcattatgttgcccaggctggtacttctgagctcatgtgatcctcccaccttggcctcccaaagtgctaggattacaggagtgagccactgcgtccggctgagtttggatttattataaaagacacgccataggtggaaagaaactctcgcttggatttggggctcaaagatggtcactattatcttgctttctatctagcagccgtctctccctgctgtcagtttcaccccaagcccagtcactcttatctgcaagctgtttcctatgatgttgtcttctaccatgatacccttccccagtcctcatttgtaaaagtactactaactttgagggtccaggggaaacaccacattcctcggtagcccttcccagacttcccccagctgaaggttctccctctcccatcctatccccaactccttgcacacttctagccagactggcagctcctgggttcatttcttattcctcctcctggactgtaagcacccctactatcccctatcccccaggatccagtcttgccggcagcacagcacagaacgcactgggtccctcccaaggagtgagtggatattacacacttgctaagtgaaagaatgagaggaatatgataacgcacagcttggtgtgataagccccaggctggtgtcagccgtgtgtcaaaaaacacatccattggagaacaggggacagctacaagtccaaacaggagtacagtttcagtccaggacaccaggctcattactggcaaagactgggttatctgaaaccagactgtgcaacagaagtaaaaagcccggccacactgcagcctcacctgaggccatcttcaactcttacctcggtcatcccttggctgagtgggaaagccactagctgggtacaccagggccaggaccctgcatttcttaggagctgccactggtattatcattagaaagaagataataatactaaacattttttggtatttctgtgtgctgagcgcttcgtgtgattgcctctcttaatctacctttataccaaccccaagatataaatataaaaaccacctcacaggccaggcctagtggcacacacgtataattccaggagttcgaaacgaacctgggcaacatagcgagacctgatctccacaataaaaaaatttttttaaataaaaaagcacttcacagagcaggaaactgaggctagactgcccaggatcacctgaggtagtggacagaggtggcatgcgcctaacacgaggctctttttactacaactttccaccaggaccctccaactactgcttaccttgactttcaaccttgagattctaaaggccaaactatgaagactcaagcagcattccagctgttccctgcccacagcctccaggaggaaggccaggcctcaacacatcaccaaggccctactacctgggcaccctaaaatcccattactcagtcagactgtgctccctctacttcttctgccttccggccctagagcccagggcccagggcctcctctaaaggaaccagctgcccccagttatggccacacccccactatggtcacgcccccactatggtcccatcatcttacactatggtcctccagcaaacacccgctctactctctactcccaaaacagctccaggtcaccttctctatcaacctttacatccactcccaggcaccccctgatccagggagaaccaacctctccctgtctcccctagcccgggccaggacttaatgctggtctgggcccagcacagaatctacactcccttactatgctgtgtttaacacttcctctggctctactagacttgggctccttgagggcagggaccttgtcttaattgatcttcatatccgtcaggggtgtgtgaaccagagcaactccatcttgaaaaggagctgggtaagatgaggctgaaacctactgagctgcattctaagtcacaggatgagacaggaggtcagcacaaaatacaggtcataaagactttgctgataaaataggttgcagtaaagaagccggccaaaacctaccaaaaccaagatggcgacaagagtgacctctggtcgtcctcactgctacactcccacctgcgccgtgacagtttacaaatgcaatggcaacgtcagcaagttaccctatatggtctaaaaaggggaggcatgaataacccaccccttatttagcagatgatcaagaaataaccataaaaatgagcaatcagcagccctcggggctgctctgtctatagagtaaccattcttttattcctttactttcttaataaacttgcttttactttgtactgtgaactcgccctgaattctttcttgtgcgagatccaagaaccctctcttggggtctggattgggacccctttcctgtaacatccctagtgcttatagaatccattaagtcatgttttaaagcacaacttcccctgaaacaacctccaaaccccttaccagagatgctcttcaataattaaaataacaaagaagaggccgggtgctgacatctgtagttccagcactttgggaggcagaggcaggcagatcacttgaggtcagctggagtttgagaccagcctggccaacatggtgaaatcccgtctctactaaaaatacaaaaattagccgggcgtggccgggcacggtggctcatgcctgtaatcccagcactttgggaggccaaggtgggtggatcatgaggtcaggagatcgagaccatcctggctaacatggtgaaaccccgtctctactaaaaatacaaaaaattagccaggcgcggtggcgggtacctgtaatctcagctacttaggaggctgaggcaggagaatggcgtgaacccgggaggcggagcttgcagtgagccaagattgcgccactgcactccagcctggccgacagagcgagactccatctcaaaaaaaaaaaaaaaaaattagccgggcgtggtggcgcacacctgtaatccctgtcacacaggaggctgaggcaggagaatcactcgaacccagaaggcagaggctgcagtaagccaagactgcaccactgcacttcagcctgggtgacagagcgagactcagtctcaaaaaaaaagaagaagaagaagaagaataggataagccattgatcaccaaggaaagcagagatttttccaaggttagctctgaaaactaggactctttaagaatacctgagcttcaagtcagtgaccccacctcccctgcaaaaaaaaaaatacctaagaaaaaggcaatctctgcagaaaaatctcactgatttagaataatcagggacaagagacaaaaagatggtctaccttaacactgcaacaaaatcataatgctcatctgatgaactggggcatatgtgcatacagctttagagactcaatggggtcatctgtcactggtgcatcccatgcggacaagcaaacggaacacaccaatttcaggcagtttaagattatcaagcaggttttgtaaccttcccacatcttattaacaccactcatttgcttgacaaacctgccctctggtcttggactgaaggactgaggcatgagccctgccctgaggccagttataaatttcaaactgagccacccccaaaaaacacacaagttttccaagtagcctaatgagagctgatgatactgagtcgggccagcccaagttgacattggcgagtgaagtttttagtcaagctgcagtaacaggataaccaagacaacatcggcatcccttctctgcgcagcaaagggaaatgaagctggttctcaaacagccagccttgctttggactgatatctagggaaacattccccttaggattcaaggcagactgcaccgtgagaaatcatttgtcctttgcacacagtcaatgagcttagacaacgccaggcagtcagaaagttggcttctgtgccactcacttgttcctgacaccacttggtaactcaaagaccctggagtttggtcctgaaaaatccctaactccccggttgccctgtactcagaaataaccaaaagctttagctgctgccaaaaaagggaaaagaaagaaaaccccaggaacacaccaaatccatgtccaactcctttgccccttggaacaaaacccattgcaggcacacacaaagcgggggaaggcaggacaaagaagaggccaggtcacactcgacaaggcgctttcttgtcgtttccaaaacagaactgtcctctattaaaatgctcttgttgctcggatgttggtgcgggaaggggtggggggagcacaaatctcaaaacaaaaggcgagacacagcatgtagggaagcccgggcaggctccttctccctgcacacttccaagcctttgaatacccgcagatctcggtccagagctggcagctgtctgttattatcccagcaactccaagggccccagcaccagggagcatgtcccgagcaggtgaacaccatctgcccggctgacaagatgcccgtcttagtgcctgctgctgccagcaggccgtgtggacctcggggaggcgcagccaacctcaacaccctctctgggatgattcttcaactctcagccaggctttcttctctctccccaggggccgcaggctccgtcactacctagcatttttcacaggaggagagctcttttaaaaaacacctggtcaccttccatagagatttctaaaggcattgagagcatggtttttctactggggggtgggctgggggaaaatgcagagttgggtacacataagaaaagagagcccacggacacaccttcccaggggttaattttaagaagggtttttaattgagctacaaagagaagaaagttttctacccgccttttaaaaagcactacctgcattagctaaaccattcccaacacaccccaacccacttcctccctcccccaccctcacagttttaattggggtaagtggctccctgatgcaatctgcaaagcaccagcccagaccagggcaagagcaagagctaagtggaatagtggggctgggtgggtgggcctagagagttccaactctgtgcttccactcaccactattttacagattcaagtacagtatttccacttgctggtcttttcaaacaactgaaatacctataccacctgtgaggatggggggagaaccacccccgctttatgcagtgagggagctgagctgactcactgggagcatgcagattggcagtggtgagcatgaatgcttttgggtctgggtctccgtgtgggggctgacatcacctggaaggaccgcaggtccccacccacaatctctctagaactcttgggcaataagaaatctgtggcttgatgtcttccaagccacacatgcttgggtctatttcgcggaccctaatcgatggctgacttctttagcctgctgaccagagccgattctttgatgggaaaacaaggtgggggacacatcatggggagagaactggccatcccagaagggggcagcagagggaaggtctggcgctgggcagcctctgggctcaagacggaaatccaccaccagtgaagaccagggtcctccctgacttaatgcaccaactgctgagaacaccataggaagggctgagatggagtgttccctgcttcggaacagaagccaagaaggagagaggcagcagtgtggagggtctgtcatgtcaaagtgggtccaagccctactgggcccccaggccctgggaaactttccaggcaaagtgaagacaatcaccctgcctgcctgacttgcaggacctgtcgtgaggctcctccagggacaatggaggtaaaagagcttgaaaaactattaaaggacctacccacaagatgtcaaaatcgagacaaccctgcctacctcatggggcccattgagagcatgtgagccagccccacagcccccaagggtaagacacccatagctgcagcatcaccaccgtcactcggaggggcggcagactcaggagggcagcctgaccacactgagcagcagccctcctgtcctaccctgcacccgtgccgagtcagagtctccaatttctaaggtttttggctggagaatgagccaaaccatcatcactataaaaaagcaaggaggtggcatgtagaaatagtccttgtatgactctacccaaagcaagctctgtgttgttccccggagccacagttctggggactccttgaccatctacagcagccaaggcccctgcccagcgcactcacagctggggagactctcagatccatctaagcctaaacccaagactgcctctctccagcatccaccggctgatttgcctccacagaaaaggggctccagcacatagcaccagctctgagctctgtagtatttcaaaagaaagtcttgctgggggcaagtggccaaagagggcttcccttctcaaggagggtgcagcttgggatgtgtgttaaagaatatgcagtggccaggcacaatggctcatgcctgtaatcccagtgctttgggaggcgggggatcagtggaggtcaggagtttgaggttacagtgagatatggatcgcaccactgcactccagcctaggtgacagggtgagatactctctctttaaaaaaaaaaaaaagaggccggacaaggtggctcacacctgtaatcccagcactttgggaggctgaggtgggtggatcacctcaggtcaggagttcgagaccagcctggccaacatggtgaaacctcgtctctattaaaaatataaattagccgggtgtggtggcgggtgcctgtaatcccagctacttgggaggctgaggcagaagaactgcttgaacccgggaggcagaggttgcagtgagctgaaatcacgccactgcacttaaaaaaaaaaaaatttgcaggattacatagaggaccagagaacatgtcctgtacactccttccttcacagcctctactatgggcccaaaggaaagagatgacccctctctgtatccttaaggctcccacccattctgatgtcacaagtcctgaggccagtgttcagacaagaccaccacagccatgtcagggggctaccaggcctcacaagcttgggtcccacctgggagccagagcccacagcacagtgccatactgcagcctttgggtgtctctcccctctgagctccccctccagtgggggttgattggtccagcttcctggaaatgtctcttccactttgaatccacttcagaaaggcaggcccaggagggaggccaggagggggtgggatgggaaggaacatcctgtctgcatcagagcaggggaggtggccctgagcctgcccacgtgtgcctggagcttttttttttttttttttttccattgagcaggaagtgttcattccaccgacaaacaagcatctggggtcgtgctagggttagggcggtggagccagctctgatttgtagaagtgaacaatccaagacaatgggtgtacaacggcagagaaatcagctccagatgcaggccagagacagctgcccagggaccaatcggggtaatcaatcctgttgatatgtttgttctccaaagaagaacctgggggagggggctgcagcctctgcctcgccagacaatggaaggcagctgggagcacagtctataacccttctttctgatacagtctagggctcctgctttctcttctgtctcaaggcttccctgctcctcagccaggaactaggggggctcacaccgaagctgtgtgcctgtgcttttttttttttttttttttttttttctttttaaagagctggggtctcactatgttgccgaggctgggttaaaactcctgggctcaaacaatcttcccacctcagcctcccgagtagctatgcctatgctttttgacatcaacagtcaagtactctggggtcaatgcctaaggtcttgcacaaaagcacgggggcctggagtgttcctgccctgcagccgtaggctgcccatcacttctgtgcagtgctcgtaagcagatgctactcagagtcaagatagctaagctttcccaaatattagggcagctggtaaggagggagactaggatttttactttttttttttttgagacaagagtctcactctgtcgcccaggctggagtgcagtggtgggatctcagctcactgcaacctccgcctcccaggttcaagcgattctcctgcctcagtctcccaagtagctgggattgcaggtgcccaccacacctggctaatttttgtatttttagtagagacggggtttcaccatgttatccaggctggtctcaaagtcctgacatcaggtgatccacccgcctcggcctcccaaagtgctgggattacaggcatgagccactgctcccagccagattttcacttttcagatctatgaggtatcagagtggctgagatggaaaatgggagccagccaaggggggcttagccaaacagttactaaggagcagagttggggccagcacccaaggtaaaacgtagacccagtctccaaggggagacaggattacctgattgtctggcaggggtaggggaggaagaccacatactgacaagacacaccaaggaagtgtatgcgggcacacattcaaataagcagttctgaggacctaccatgtagcgcaaactccagagggaagcaaaaagggcgaaggactcctccacttcacagagctgtgagatccagaagaagggcacagcaacccttttatatcacacatgtcaccaaaggctgtggcctgcagttgtgcctacacctggctagtgcagtttcaccaacattggtggggacagcaaaagctccctacctggcactcacaaagcctcaacattttctttaaaaagatttgtgaaatagactgttaaatggatgagcagttagttgggtctgataccttgaacatgcttccctagacaaagattctatgaacttaaatatttccttagatcctgcctaaaagggacctcaaagggctcttaaggaaaagagttgttctttttgtggaactggtctcaccagaattggagagtgagctgcctagttaagacagtgagcacccggtcaactggcagtgtcccagcaaaggaggtgaatgaggaggcttccagtgtcccctcccagtatgaagtcaaagccacctgggtacagacgctggacagggaggggatacttgttgatctggccaaccttccttgataagcaggaaagggggaagggagctgaaaatcctaagaacaaaagaacggcagagcttgtcactcggccctgatcatccatggcaccctatccagccatctgtcacagcatatagaaattccccgcgtgtgattctgtctgcctggagaggctgctggctcttatccatctccctattcccactgagcttggtgcccaggaggcccccataaacattactgaacaaaatgttgaatcaaggctactaccggagcctccctgtacagatcaagcactgtctgtacccattcctcaaggccaaggctctctgggccacataactctctctccttaacttgtgagacagcctgcagctcataactgcacacaatagcacaagaccatgcctggtctacctctgtttccagccgccgcctgtccctcctctcttacatagctgcaagtccctggcagtcaaggaaaagaaagaactcaccacacaccacttggtactatgagaagcacacagcagatggacttggtgtttggtacagaaagtagaaaagtcggagttataacatttttcatctagagcaagcaaaaaaagagattcttcaatgtttaataacttccagtgcaagttaaaatgcagttagagtacccatttatctattgctagcctcagtataaattaagacaacttttttttaatttaaaaaaaaaaaaaaaaggtcttgctctatcgcccaggctggagtacagtagtgtgatctctgtctttaatttttctaaagacagggtctcttgctctgtcacccaggctgggctgcagttccacaatcacagctcactgcagcctcaaacccccaagctcaagcaatcctcctgcctctgcctcctgagtagctgagactacaggctcacgctactatgcccagctgatttttttttctttggtagagacagggtcgcgccatattgcccagattggtctcggactcctggtctcaaggaatcctcctgcctcagcctcccaaagtactgggattacaggcatgagccattgcacctggccaagacaaccctcccgaaaataatttggcaaaggattcaagggttttagcaggagggtccttattttctgacccagtaattgcacttctgggaatttattctaactgggcgcggtggctcacgcctgtaatcccagcactttgggaggctgaggcgggaagatcacaaggtcagaagatcaagaccatcctggctagcacacagtgaaaccccaactctattaaaaatacaaaaaatcagctgggtgtggtggcaggcacctgtggtcccagctcgggaggctgagggaggaggatggtatgaactcgggaagtggagcttgcagtgagccaagatcgcgccaccgcactccagcctggacgacagagcgagactctgtctcaaaaataaataaataggccgggcgcggtggctcacgcctgtaatcccagcactttgggaggccgaggcgggtggatcatgaggtcaggagatcgagaccatcctggctaacaaggtgaaaccccgtctctactaaaaatacaaaaaaaattagccgggcgcggtggcgggcgcctgtagtcccagctactcgggaggctgaggcaggagaatggcgtgaacccgggaagcggagcttgcagtgagccgagattgcgccactgcagtccgcagtcccacctgggcgacagagcgagactccgtctcaaaaaaaaaaaataaaataaataaataaataaataaataaataaataaataaataaataaataaaataaaataaaataaaataaaaatgtcttagtctgttcttgctactataagaaaataccttcgcgtgggtactttataaataatagaaatgtattgctcacagttccagagctggggaagtctgagatcaaggcactcgcaaatttggtgtctggtgagggcttgagctctgcttcaaaaatggcaccttcttgctgcatcctcacacggcatcccttcagcctcttttaggagggcactcattccattcatgacgatggagccctcatgacctaatcacattccccaaacgacccacctttcactactatcacactgaaaattatgcttcaacaatgtgaattttggggagactcagtattcagatcacagcaaaaatcatccacaatggaaggcaaagatgttcactgcagtgttatgtacaatggcagggtggagagatggaggacaggaaggaatcgccaattaagggaatgattcaataaagcatatgaggccattaaactgtaatgataatatactatttatcaaaagaaaaagcatcggccaaccgtggtgactcacacctgtcatctcagcactttggaggccaaggcgggcagatcgcttgagcacaggagtttgagaccagtctgggcaacacagtgaaaacttgtctctacaaaaaatacaaaaatgagccgggtgtggtggcaggcgcctgtgatcccagctactggggaggctgaggtgggaggatcacctgagcccaagaggcagaggttgcagtgagcagaggttgcaccactgcactccagcctgggtgatagagcgagactctcaaaaaaaaaaaatcataatttgataaacatgtttatcaaacaaaaaagcatcaaaccacaaaaaaatgtgtagacctgggcagccttttttccaagtctagaagtcactcaggataatagtaaatgtttccctttcactttccaaaacgtgtccaaagttgtctacaagagatggggtgctgtactcaaggagggaagacagtgaggtcatgtctccatcctctgtgtttttgtttgtttttgtttttttaagatgaaatcttgttcttgtcacccaggctggagtgcaatggtgcgattttggctcactgcaatctccacctcctgggttcgagtgattctcctgcctcagcctcctgagtagctgggattacagctgcctgccaccacgcctggctaatttttttgtatttttagtagagacagggtttcaccatgttggccagactggtctcgaactcctgacctcaggtgatccacctgctttggcctcccaaattggtgggattaaaggcgtgagccactgcgcccggcctctccatcctctttctatgccatctacctcatctccaggcttggggtgggagcgaggagaggtgggtaaagactttgaaccaaggcaaatgaacatggttccaggtagtgttcacatgacacctccaaggatgacatttaaccaacaggaaccttctgggagtatttcaataccctccaaaaaaccaaaccaggcatgcaggctttatatatgcaatgtgcatgtgcgtacagagagccataattttcaatatagagatacagctataccattccgttccctaacagcagcagtggccaactttctaccccaaccagccatctggggctcaaagggaaggtgtcagattgatcaccagggtaggattaagttttttttttcttcttaaatccccttaactgagaaagcagcttgagccaattctgctttcctcacagacaccaaaacaccaagctatagttacaccagttcatcttcacaccccagagtttggggggctgggggaggataaagctttccaagcagctctctgccgagtctcacctcctggtggaggagctggaggcacaggctgtaaggaacaggactgccaggagaggaatgtgtccatagcctgctctcccaggtccccttcagatgcaggaagtggcatcacctctcaggagcctctccacatcccccaccccaagccgggaatcttccccctcctcccactacaaagatattccagactattatatcactgtaccagccttacctatgccagttacaatatccttaaaacttagtgagagagtaacaggagggaaggggtcgtcctttcccaggatgtatccggcacctttccctgctatgatttcatctatcccccgcagcaacccagtgaatggcaattcccattctatggatgagcgaattgaggcttggaaacactgcaattctttggccgaatccttagtgttctaggctgtccacaccacaccagctgcagcagaccacgctcaatggagtagaagggcaaagaaccaaccagccctgagcactggggacctgcaggtgcttctacatgtgttctttctaatccttctaataacctagagaagtgaggaagtatccttatccgcagcctacagatgagaaaactgaggctcagcgaagagctaacatccttctcaaacagcttctaaatgatgagccagatagacttaagagctagggcccatgtccccttgcacagtgacggtcaccttctccccaccctcaccattaaatggaaagctcctctgacaatgtagacgtgaatgggagttgcagagtgacccgctctgcaactcccatccaggtctacacctggcactatgtaggtacataagacatctgcctgtgctgggggaaggacgggaagcagaaacccctttataagggaaatttccaaacacagaagcagcaggagcctcaggactcagccttacccactcagtgtcactttcagccccacaggtgggaaggtcctcagcatcccctacctccacgcaagccaactttctgtgctcctgcttgtaccacacagaccctccctgaatttgttaatgatcaaccttccaggctggcgcgagccttccaaggggacaatgaccacctgcaggaaaaatggccagaggcaggttctgcatcaatttattaggtttaaagaaaaaaaaaagtcctgaagaaaaagcagcagctaagacatggtatttccagaaaatttgtattattcttttgttggcctcttctctttgaaggacgcaggtggcctgggaagcatctgaggaatgaagcaaccacaaagactaatgctggagaaactggcttcaaactcactgtctagacagacttcacgatttttcaagatttgacagaaggaaggctccctcagtgtccagacccctctgaaatgcaccaacaggaggcagcttgccatccattcctgtcccaggtacctgcttcatgccaggctggagagggaggtgaatcttcagaggtgaatcagaggcctccctgccctctagggacttccaatctagcagaagagtcaaatgccagtgacttccagggtggaaaagcactgaacaaaagtgaaagggaagccagtttcagagatgagaaatggggtgacactggcctttttcaaaaaaagaaatggaccacagagggaagacatctggcttcaaagaagccaaagacaggcaaaggcagattataccaaaaaggtttttttgttttgttttgtttttgagacagagtcttactctgtctggagtgcaatgacgcgatcttggctctttgcaacctccgcctcctgggttcaagcaattctcctccctcagcctcccgagtagatgggactacaggtgcccgccaccatgctggctaattttttttgtatttttagtagatacaggttttcaccgtgttagcaaggatggtcttgatctcctgacctcgtgatccgcccacctcagcctcccaaagtgctgggattacaataggtgtgagccactgctcgcccaccagaaaagttttaagttaatgccagagtcctgagaggtgggaaggaggtcaggaagtagctgctgaacatcatccaggtgctaggaactgggggcagacacagaggcacaggccttgacttcaaggaaaccaggagaaagagaaggagagcagataagcagatagcttcaatccacacacggaagcttctggggctttctcggaaactgcagcaactagaacagtgcctggcatacggtacgcattcaaccaatgaatttgtggaatgaatgaacaagagtacaaaaaaagggtgtagtttattccgctctgggaggcaggaaagctttgctgggaaaataacctggagctcagttgcaaggggaagcttgccccctagcaagcaaaagcagcaaggggcatgtcaggcagaagaaaatgcacaggcaaaggcacagtggcctaagggaacatggtatagccaagaactcccaagaagcccttctgttcatgctggagagacagaggatgctgtgacaaaggcactgaccctggagagacaggagatgctgtgacaaaggcgttgacccacagggccttgggggcccagccagggaactcgggcttcaccctgaagaacaggagaatgccctcaagactgcaggcactggtgcagcgtggccagatgtgtttcagagagagaactctggcagcaggctgtattcatctcagtgccctcagtttctggatgaagaaactgtggacttgagtggggctgtcatttgcccgaggtcaagtggctgggtggtatccatccctagcttctgtcccagggctccttttaccacaccctgctaccatcccgaaagctctcactgcattacctcaatattccacaaacgcaacaaaggctcttctaggtgagtctgcacaaacaagtagggcaactctcaggccagaggcctgggaaggccttaacctgactgcacttcggttttctccatggaaaactgggaaatcgatatgaaacctagagttcccgtgcaagtcaaacgaagaatgcacgcacagcttcagctcactgacttgcagatggtaagccctcaaaggacaaccgactagcatcactcacgcaaacatactggagtgtcttccatgtgctattctggaaattaagagcagaatgaggaaaagggagctgaagtcgaccaggctcaagatagaatgtcccccatgagaaggaggtggggtctcagcccactggcctacaaagtaaggaggttcagtgagcatgagtagaggcatgatgttttgagtactgcttgattgcctggagataaaaactgaaagctggttggaagaagggctggaaaataggatgcactctgctcaaccctgcccttccaaagcttcaggactggaaaatgaataggtctaccagacctcaaaggctgcaggtgggaagtgggaggggcacagtggtggccccgcttccagcctttccatgtcatttatgacaccactgtacaagaaggatctggcttctcacaagtctccacaatttctcttgtcccttcctggctgctgggacaggctgaccaggcaggagaaaggaagacacagaatcaggcagtaaacagggctgacaaggactaaagacacctgtggatttgaggcatcagagattcatcgcagcactgctggtgaagttttgtagcacggggaagcagaggcttcagtgggttgaggtgcaggagaggtgaacagccatggccaatagccaccagcacagacaatggctagccttctctgatgtgtgcccaccacacatcagaactttttgggagttcttgggccaggaggcaatcccctccgggatctaggatatagctcattcttactgccacatctgataatgcacctggccacataaactcaagatgacacctatcaaataccatgtgaaaatgcccaaagtcaagcaggaacatgggatctacattatgtatgctaaagagatgtaggaagcaagatcctcccctgcaggaaggacaaaagaaaaggaaaaaaaaaaagggaatacccactctctcctctccaagcaacaactcacctgtctccctaccccccaaccccggcacctcaaccaaccaacctaggttcaagcaaaaccatccatccacttatgcgtcaggtgttaagtcagctggcattaccaggtggcctttgaaagtcccaacacagcacccaacataaaacaggaacccatacaatcactggttgccctcaaactgccccaggcacttacaggggggctgggaataaaaagccgtaattgtcccaggacaaaactgacaaataataactcgtactccatgggtttcgttcactgaactctgacctatgattttcaagggaactcaggaggagactccaaacttccagaacaaagacaaggcagaagaacctttttgagttatttggaacttcctggggtgaggagaggtacagggcccttcaatctcccacttcccagctcacagaaccaatggacagcccttaagcaagtcaatgaagctcccagagcatttgactactcttcagtggggaaagaaaaaaaatttaagcccccaaattctgcttccagggcttaatcagtgttgtaaaggccagaagatgcacaagataacagatacttttaccataagtggggagaaaagtaaactactccaggaaacagaggcaagatctctgctctcaggcctctcgaatcccaagacccctccagcaggtggggctgggagtcaggccctggaaaccagttcctccagcagggcaggacgccaggcgtcctgctggaaggaggctccccatcttcctgggaggaggtgttgctccagcctcctgtcctggcctgctcatcagaccctgtcccaacaggcaggtaaggactgctcttggcctcacctcaccacgctatctgccttcaggcaagtgaaggaagggccgagagaaggccagcagatgtgtgggtggatgcgggtgcttgggggcaaagctcagccttggattgcaaaagcctggattccaatgacagctgaattcccacctatctggaggtggaaaggactgacccagaaggagcagaggaaggctctgccccagagactgtctgactctaacccaaaagtgaggctgcaaagactgggttgtggtagagggagataggaactagcaaaaaagacggtcttcctttttcaagctagcacaggcccacctgagcaggatgtacaagcagaatgcagcaggtatcctatgtgtccccccagagaagattaactgagtatcatttatagaatgccagcatcgcactaagtattatcctaagcattttacaagaattatctcatttaatcctcaagcatccttgaagaatgtgttttatccccattttataggtgcggaattaaggagcccagaggttaagcgtgttgcctgcgttcctgaggttagtgagcaaggaatgctggcatttcaaacccaggtttgtcaggctccaaccagctcctggacaggatcttcttccaaaaggagaaagccttccggccacagaaatcagaagtggggatggactctttcgacagtcttcagggctgcagacaaagcccctttacaacaaaatccctcttggcaatcagaaaagtcaggcaaggggttggtcccttccagacagtccttggcacagccccagcatgaggctcggcttctgtgccatcgagaagccggctgcattctctgcagctcttcctgacgacagtccccacccccacacccctacagaacacttcactcagtgaccccataggccagagcaggataaagtacagcagccccttaagactgacatccatcctggggacactccctcgaaagcctggaaggctgcagatctaccctcccacgcagcaacccatcaccaaggctggagaggccgaggagagaaggccagcctgatttacagaatttaccaaatgggtccgtttttcaccccgttccagttccttttgggaaaactccaggtttttaggagtagattaatggcagggagttaatggggtggtgatatatcctgcttgaaattttttgaaaagttctgcgtcaaggcatccagtggccccgctgtgatttagtacgctggcccctgagaacaggcaggtccaatatgtcggtaaatctgctaaacgaggtggtttctggagggtggttttcaagatacacggcctgacatgttgccaaacttcccggctagctgagccccaaatgtgaagacaatgggagggagccaggcagaaagccgctctgctctaccaagaggagaaggcacagcctgcagcagccagcactggggagcagagagctggacctatgttctctggctttctgctttggcgggagaatggggtctaagaataaacaaactaagagagtagagccaaaagggaactttgatatcatctactgcagttccattttataaacggaaaaatggagcagccgagcatctgggcccaggacctcatcccagcacgagtcactccagcactgagcgcccagtgcctttcggtattgtagctccatttctgcccactcctctaaatcccagccagaccccacagcctagctgcccctttctctgagaaccatgttaaccaacaagatgatttgtgagcctctgatctcactaggaaaaggcaggaacagaatcttacttctctaggcccaagcatcatgggattcaccagctcttctggatctacagacgtggctgaatgaatgaagacaggagtggaaggtgggaaaaaggtcagacatgccataccaaagctttccaagggccaaggctttaagatgcaatacatccaatcacaatcagccctcccaagatgaaatactcccttattttgtaactcctgctgatgtaaaattctgtatcagattacgacaccatcattccccattacctttgctgggggattcaattattggattaatttataatctgccttcctggttgtttttttgcctattgctctctttatactaaaatcacatgtaagtagaacttaatcaaacagttcgaaaaggattttgaatttgtctcgactgccgatgtcaattcattagaggcgctactgtttttctctggtttcctccacactcctctccttattttgaaatccctagaaccaaacctcttatctgcggacttaacacagtggcaaagataatcaaagggaaaatcctgcttgacatcaggggattgtactctcgggtggatttcacaggcagctcccccccgccaccccccacccagcagcctgtcacaccttcatgtgatggcttagtgagcaccggccagaggcaggcacaggggccgaggtataggagcaggttccttttagcagggatggcggtgctgatggcagcagcagccgcagctcaaactctcaaatctccctcctggagctcagggtaatctgatgatcgcagtgggtaattagagtctcttatcaaaacaattagcggatgaatgaacagccagtcccatctctgacacaactgcacaaggcgcagcaacaagagggggaggcagaagcaggggaaatgacgaattccagcccccaccgtcatgcccattccgggggacaccggaactccagcctcacctccagcttctccagcatctgcccggaataccctcccgcatcccttcctctttgcagccaggtcagcctccttttccttccaagcctggtttggtatctcctccaactctgcagataccagctcctctgtgcagaaaggtcctgccagtcaagctgcttctctgccccaagcttattctatttagccaccaggctgggacaccctgggcaggactcaaagctcttccttgacgcagctcctggcactgggaaagggctccataaatgtttgtggcacacacacgcgagccaggcctgcctttctccctcatggccgaccccagagcattctgactctaataactgtttcatgggaatacccaggccgttccacccattgcccttgtctgcaatttcattagctaatgtttaaaattcaaagctcttccatcatttccgtgtctccccatctgtaaacaggcctgtgggtctgataccatttgtttccaccactgaaaatacacaaggattagccagaaagccctgtggaaacataatcctaagtagcgcaggccataaggcaggaacaatttacaagagcccagagttggtcctcctgtttggtttgtggacctaggaaacggggccaaggagaaggtggtggtggtggtgggtggggggtgcccaagatgtttctggggatttcaaggacaggcaacgccagggcagagccgggcctcctggtttctaagcagtaactcaggcacttgggattaggggtgcctcatcttgggcccagcctctctaggatcttaccccagtgccacacccaaaagtgacacattctggggtgctctgagggtgcagaatgcccttctcccgcttcctaatgctcaacaggaaagagagggaaaaggaaggaaggaaggaaggaaggaaggaaggaaggaaggaaggaaggaaggaaaacaacaacaagaacaacaacaaaaaaccccccaaaaaaacaggtaagggccaaggcagagttctccatctgcttttgttttccatcacgttcctttcaaggcctgggatctgctaagccccgggaaagccatggcatcatctgtccacttccccctctgcaatctgccgccctgcctgctcctgacagccatcaatcactctgtaatgtgctgacctcaaggctcaggggacagaattttcaagtcaaatgtagccgttaacataaataaagcatcgccctggatttctttctttctttccctttctctctctcttttttaatgattctgcagctgctgctggggactcggtaggcaacaaaagtgagggcagacaggcatagtggaaaggcaattctacttttctgagtcataacaattatgacgttataataagaaacattttctatgaatttttaagtacgagttatcctgttctgcaactgtccccagggaaaaggacaacagattcaacaggactgtgggctacactcatctgtccagagccaggcagacccctgggtcctgtcccctcccccatcccaggcacgctctagctggggctcactctgcatcttaaataaagcagttgtcctttaagcacatttacatgcaaacgacttccatataccaaatatagttccgtaagccagcgtttatttttaaacacgaagaagagtctcccataataaagctcatgataaatgttatgatcctcaaaatggttgatagggaagaggacgggcgactctagggagtgggagggagaatgagggcttgtaccctggagtcactccacagccgtcttgacctcgtacccaggcagatcacatgcagggcggcactcctcatctcccatcctctctccttgcaagcaacagggcccgcagcgaacaatgagtcagaggcaaggaccacatcgtccagtgtgttcacaacaaggaacacacgcacgaccctgcctgagcgaggtgttcatgtgctgaaatcaggactgctgagtcgccagcacgacccacctgaggcaggaggctgaggtgaccaaaagcttctggtcagaagaactacctggcagggctctggtcctggctctactgctgatctgctgtgtgaccttggccaagtcaccaccctctctgggcctccaggtccttgtctacatacttgcagaggctagcccaggcctcaccatgtgtgactgcctcatcacaccagcaatcccagcagctctcgctcaggctccatgctgccttgtccaccagagtttctgagttcctgaatcagcctaacagtgttttgacatcttcactcacatcttgaaaaacgctggggttcctccagttccttctgggagaagcagctacagccatgttgccaaggcgcctttataaaaagccatcacacaatgacaaccccacagactgattccctctccagtggcatctcccttacctgtaacccaatacctaccgggaccttaaagaagctgagaaggggccactaccccaaccttggaaatgaagctctggccacaggcactgcatcaggaacgcaccaggccctacttcctccacatgacggtggaacggggagccagtgcttgcctgtccaggagggcaggggctggcgtgtgcattctcctcctcttcgtctctggctagtgggtttttgtgggaaatgagaaggatgcccctgaagggtacctagatcctgcctgttttgcaaagttccaaataatattctagaaactctgtatggctttcttgactagcctcaaaacagagaaaagaaatgcatctcctggacttctggaaggaagggggtttgagtctattcccctgcccccacccaaactcagctcatagaagaggtggatagaccatcaaaggcagggagggaggcaaacagcctgtgaccctgaggatgaatgatatactttttttaaagggctgttcaaggcagacacattaagaaggctgcacatttatctttctgacattttaaaatatgctgcaaaaagctgaatcttaaatcaaggtgcatttttaaaggcatgttagatcagggacaaaacctcttcctttcttccttcaaggagcatgcctgctgtgaagcaaggattactgcatgtgacagtcccagcctcctgcacaatcaatactgattgtgtactgggaggaggcaggatggcctgccaggctggggcttgcaacaacaagagggcccactgtcaggcctctgccacctgcctgtgcttggtccagggccccaggctacaggggaggtgagcaagcctcaaggagactataggctctgcaagggtcaccagaaaaggacattttcctgatctaattcagggatctccctccccatcaactgttccaagttacacaatcacaggcagggagcccccagcttcttgggaatctggatgccatggcagcaaatgttcaatacaaaacagcggcccagccgctcccctccctgagaaatgggggaggggacaagcctggttggctgtccttctcaccccacaattcatcttgggctgctagggctggagtacggaggggagaggaacactggactgcttttgggtagattttggtcaatacccagtagctggaaggagagcttccaacataacaccaaggagaccacgcatcccagactttgcacgttcacacctggcgccccaccatactgatgaatagcactgcctggttataaaagtatcctggttgggatattatatggtcccctaatacatacacacaagagccttgagcccaagaacaaaacggacctgcatggatcccccgcacaggcagcccccaaagcagagaaggcaggcctgaaaatcaacctgagccagaaggaaatctgggccaaactgaaaaaaacgcaaacatcaatcaacgtgattaccaccagcaaggagggaggaccagcccaaagggcactggttccgggcacatgaggactgctggtgaccaagagggaggcatgaatggcttcccttaacagaggctcaagtagtggttcagggaggagcaaatactgtgcccagggagtcacctggcctggccccctacacctccacggccatccattcccattttattcatccttatggctataccaagttctttctggcattgagtgtaaaattctactatgaatccaccgcctagcagtccctgggggcaaaccagagcaagggcgaccgctttgttcacaggagtccctccccaccaccagtacaccctaggttcctcatgcacatccctctgatggaggtacccagcactgtctgcctgtcacctgcaaggtgaggacacgggctctacctgctgacacagcccaaatctcaacgctccaaccttgtgcagtcaaaaaaaaatccctttcagagcctaactctcaaggacacaaccagcccagaaatctcccaggacaggatcccacccacgtcaaaaccaggcagcaaagagacacccttaacagatcgccaacgcaggccaccctgaagtccgtgctacctcctgagcacaccaccgtgggtgcagatcactgctcctggtgccagggagcagggatcccccaatgcatgattcggcagagcctggaagtaatgaagaaatggctaatgacagccactgaaggcactgttaaatggcttattacattttgtaaagaaaaatacatcaacatccatcattgcaaacactttagtacacagaaagcccttcaaaatttccttcttctaagtagaaataaaggtttatacatgtgtatgccacataaacatatgccccgatataataacctccgcatgtaacgtcctctatatagaaagaagcacaggtatatgcctggctggagagacaaaggcgcattgtctggacacagtcactcagtattacagaagtgtgtgcatgcacacacacactccctcagaccagatgcccaaccacttccagatgctacagtctcggatatccttggttaaggaagaggaagaaaaagctcgcccttcacgtccagatacttgggttcgggttacatgaaacaggattagttcagaaaatcgtgccacttcacagccaagacaaaaacccaagaatgaaaaccatgtatacagccaacacaatagcaagactgaagacagtgacaaagagagttttctggttctgctctgatgcctctccctccacaccacacctgtgatctactgtgcataggatctcacaggcccaataacagagctggagttcctcttacgtgacacaggatttggcatttgcctgtgccgggctatcactcctgccctgcaacacgctggtcagctggagaagcctgctgctcacacactcaccagcaacttctctaccctggatggtcaccaaaaaggaagagcaatgtctgtgcccccagcattggtgcaaaggaagtggcagagaagcaacaaggagggtggtgccttgccccaactgcccgccagcacccacagccaaggcaactgttctctggtgaaggcagagctggaaatgcatgcctgagcctcctaacacagggtctttcccaccagtccatgtcatctgcccttcccaacagcttccaacaacaggtcagtgtggctcttgctccctttcatgaaaatcaccagccacagacctgtgcagggctgcaaggtcactggaggttatcaagtccgaatcatcttatctcccagatgagaaaccagggctcagaaaggttgaaggacttgcccaaggtcgcacagctcctaagtgaagggctgagagtggattccaggctgcctagccaaagcctgtgagccttcccctcagttccagctgttgctattagctcccaggaggcaaggggggtggcaaatagaataatcagatactggcaaccaaggaaggtggcaggagcagtaggtgaaaggactcccacatggcagtcacagatacacgcatcagccctgcaggagaggcagcaacagtaagtgagatgcaaggaaactaaaagtggagcagggagctgctgggaggggtgggagtgtggagaggatgatgtgggatctggagccaggagacctgagtctagtcccagccaccttgaatgcctcagccaggtcaagctgcccatctggctgcattgtttcatctgtaaatgaaagggctgggcagaagagatcatctttccaaacccccctggccccagtcactagggcctgactatagctttggcccacatttgctagctatgtggcctctaagaagtcacttcaccttcctgtgcctccactccctaaccagagccaaggaagtgacacgctcccaggggtccttgacaagagctccaaaaaggccacataagcctaaggcatccctctgtctgccctggcttagggagaaagataaaaaaaacggacttgctcccttgtcccacagccaaagctgccactcaacaagggccctgagagggcgtcaagcgcatcagagagtcagattcagtgcccacaggggaccagaggggacaagtaaagtgtgtcactgctggcactcgggtcaggaggggagtaagcaaacatgcacgcacacacacgcgcgagcacacacacacgcgtgcgcctcctcccacgcagcattgttcccctgtgtcactgtcagcagttctgctgcgcttgacaaccagggcttcctaatagggccaggctggacctggcaaacacctggtcacttcccctcctgtggtccgcagggaccatcaccactgaacacaccactgcttgggggtggggaatgtccaggaaagctgaccttgtcctcaacaaagccctgggagccagccagctacgtgggtgtgcctggagaccttgcataccccacagaatacggaaaggattttcataacctcatagactctcgggagagaagatggtctcctgcatcctcccgcctcctctgcctattcctggccatttggtgtgcagagtcaggagagcagatgcctctcccatttatacagccatgctcaggctgtagctctgccctggatccaaacaggacagccatcatcctgccaaaaaacaccgtcagatttctcaccaccccaacccacctgactctccgtaaggctgcatggcctggtaattaaaaacttcaacaggccaggcatggtggcccacgcctgtaaatcccagcactttgggaggctgagggaacatagtgagaccccgtttctacataacaaaaccaaaatcaaagaactccaagacaggctatctgggtttaaatcccagctctgccacgtataagctgtatcatcttgggcaactgacttaccctctctgtgtctcagttttctcatctgtaaaacagagataataatggaggtgatacatgtaactgtttagaatggtgcctggtacacagtgagggccatataaaagtcaaatgtagccaggcacagagccttgcacctgtaatcccagcttctacggcagctgaggcaagaggatcacctgagcccaggagtttgagaccagcctgggcaacaaagcaagatcctatctatataaagtattttaaaactaggcaggcatggtgatgtgttgtctgctactcagagactgagatggaaggatcacttgagcccaggagtttgaggctgcagtgagttctaatcataccactgcactccagcttgggagacagagcaagaccctctctcaaaaataaataaaataggcctggcgtggtggcttatgcccataatcccagcactttgggaggccgaggcgggcggatcacgaggtcaagctattgagaccatcctggccaacatggtgaaaccctgtctctactaaaaatacaaaaattagctgggcgtggtggtgcgtgcctgtagttccagctactcaggaggctgaggcaggagaatcacttgaacccgggaggcggaggttgaagtgagctgagattgggccactgcactccagcctgggcaacagagcaagactccctctcaataaataaataaataaataaatttcaaaaataaacaaataaaatacaagtcagatgttataaagactctgccagcaagctaaatgctgtcatttccttcagtgtttctccattccaaatctctaccatctacggacccactcattagctccaaatggcacaggctctgagtctgacctggattacagttggtcccgccactttcttgcagtttaacattggtcaagtaacttaacctctccaagccagggtctcctcttccaaaataggaggatcatatgacctacctcaaaggatggttttaagaatggaagaataatgcatgtaaagtacctagctattaggatgaattattaacaataacaacatcatctttctccttgcggacatgatacctgtgcagtgagcctgtattactctctttcagtgatggccaactgctgccacacagagccgactggcagctacattcaagggccactttctcacttgccgttcaaatgaatcttcttcatcctgtgcctgtgaagttgatttttttgaacccacattgtaggactttacatttatgcctattaaatttcatcctgttgttttggacctggaaatgggaataggaggctgaactaataagctctgactcaagcagcacagaggcactgccccgggaagagctgcaacccccaggaaaggacaagggcctagaggagccaggctctcagaactaaggtgacagccacagctgtgagggcctcagccagctctgccctttgtttgcccaacacccggacacaagaatcagctcttgttaccagaatcccatcaagaagggcaaagcactacgctttcaaaaataaagccacatgtgcaaactgttgtcataaacatagccctgttcaaggcctccgctgcattcctccttggagagcaatatgtttcatttcttcaacataaacagaatcagatttattacattccgacaatgtttctaggatggggactgagaaagctgcatttctgggaacaaaaggcacttgtgcataagtgtgcaaagaaaaaggagacaagagacaaaaaccaccttccagactctgggccccggcaactgtgatccatgtcaagaaccctcatgcaatctgccctgcatggctggcagagacagcaggagacagaggctgatttaaggctagggctgaagatcatgtgtccggccagacttaccacaggctgccatgggccccagagtttcacaacatttaaagtctatctccccggtgcccaaacacatcgattcaaggaaacctccctgagaccgagaggcccaaaaaggcgcaaggctcatttctgcctgtcctcaggagccagggaggcacgcacaatcccgtaagacaagcactctgatccctggaaggtgtcagagaaacagcaaggggctgggttctcactcaaatggtcagctcttgtcgcttctcccaggctggacaaggcagcaacgcagaggaattcctggggaatccaggcaggaaaaggaagtagctgggggaagggcaggagaaataagtctcgcaagggaggattaagagcaggagccaagatgatgtcacaggacaagcatgggcactggagccagagagatgggcgccaattccagctttaccgcttcctgtgtggcttcgaccgattacttaacctctctgagcttcagctactacatctgcagaaagaagggaataaacagaaccatctctaaagttcttctagcactggcactctggattcttagccagggacttctgtacctctgatgggcataacttcttaaacttctaactatccattccagaaagactataatccagtgggctatcctgtttccttttacccactgggtctctgcagtaagcagggcaaatatgagatgggattaaatggatgctgactaacatggccccccacgttgggggactcaccggaaatcttcctgaagccctcagaggccccagcccccgactgcctctcctccttccctccttttctccttccctcacaacactaattgggagggactgcattcaattcctgcccattctcggtgagcatccctggctcccatgcacacgcaggtggggaggggagagccagcactgtccagagcctcccaagcccacggagccaatgggctccaagcagatgcccccaggccctgtacagatgggcctggttcagcagcttttcaaagtcaacagagtaaggttttcaaatcctaaaaggcttctcaagcctcttctaatctgtctgccattttgttttgtctgctcagcgcaagtcaaggggaacttgacatttggaatactaactgcaaataatcccacaccaaggacagggctttggcgtgctgcagcatcagcatgtggctcacaaggatgctggggacactcgagctatatgcagagggtcccagaaggcacacgttaggtcaggcccctcagccacgtgcgtggtaaccaccctgaatagccagctccccaaggacagggctgagcccaattcactggcttcctcaacatcatgcccagggtgtgacagaggggaggtcccgcgcagaatctactctggatggaggaatgcacacagaggtggagggggaaagcatgtgcaactggtatcttgacagctctcaacgtcagcctctgccccaagccaaccaagcaaagtgcgctgccgcaggtgagacacactgcttctctgggcttccgctgtcttctcttccttccactttgtgacagttactggctccccagttgaccttcacagtggaatcggccagcaacctcttcactctggccacacacctccacccaccccaacggttcacagggcacacaggcaggcctcatgaccatcccagcctcacacacactcaggtggcacagtgcatgagccaggccaggacctggtgttgcagaagctggtttaacccttgctttgcaataacccaccctggcctgccctctcaaggaagaggcgcagggatcttagggcaggctttgtgctgctgaggctgttctcgctccagtctctgacttcaagcagcaaaaggttggctgaaccaaagcattttgttttcctcaagcttttttttttttttttttttttttttttttgagatggagtctcagtctgttgcccaggctggagtgcagtggcaccatctccgctcactgcaacctccctccgtctcccgggttccagcgattcccttgcctcatgagtagctgggactacaggcatccaccaccacacccgactaatttttgtatttttagtagagacagagtttcaccatgttggccaggctggtcttgaactcctgacctcaggtgatcacctgccttggcctcccaaagggctgggatgataggcgtgggccaccatgcccggcctcctcaaactttttgaagacagtgagttttttgggcataaaaaataaaatctggctgagcatggtggctcacgtctgtaaccccaaaactctgggaggccaaggcagggggatcacttgagcccagtagttcaagaccaacctggacaacataatgagacccccatctctatcttttaatttatttttgaaaaataatgagaataaagtcccaggccgactgagaaataaaatgagatataatgattgtaaccatccatgacatcatgtgtgtatattacactcaacagcaactaaaccggaagtgcttctccagtttgtgaagccagcttctgcactcactgcctgctccaggaagttgcctgtgactgcccctgtggtccaggtgtccctctcctgtgttcacagcctcggtgcccctactgcaatggggctgcatagccggcacctacggcagggcgggctgatatgcttgccttgcatatgctaaagcgaatgtttatttttccatttccccaactagactgtaaaatccttgagggacaataccttattctactttactttgcaaatacctgggaaaagatctagcatgtatctcacactgaaaaaccatctgttgaataaataaccaaagtgatgagcacatggctgcccgcctatgcttcccgccctctcactcccgacccctaaccccactttctccacccgctagaagcattctgaagagaatggaaaatctcagccaactattcagggtaactgtccggtcactctgcgtccatttgcctttacggcaatatatatactaaagggtatgagctcaagtttccatacatacccaggcagccaagggagttctctcttcccagccgaggctaaacagggacccaaccacaagcatccagtaattctgaatatgacgtgaacaacgtaaaaatagctcctgtatctctttgcccccacccttctccccaacaacacaaagggcagaagagagtgacacccctaacaaacagccccagcctcctacatctggaccagctgctgtgagccaacagggtattctaaattatactttaattaccataatttttcacaggtacctgaaaccagatcatgacgacggtgcaagaaatccccaaataggatgcacgaggtccaagttaaagctagtcttctaaacacacaccttttctcacatgccttttatttcatgtagcactttacagtctgcagagtgctttcatgggccttctctctcccacaggctctggattaagacaacatggttcaattccagcctccaaagtatcctgccctctccagagacccttcacctatcaccatttggtgcaatctgtaacagaaaaaaaaagaaaaagaaaaagaataggaaatgggggagaagggggtcttatcttatcccatgggttactaggaatgttaaggattaaatggaaagcatagttaagatttttaaagagaaagcacttattgaggataattgatgctggacagatagcagattcttggcagacacacattctcagtgtggatgtgtctatacagctaatggttagaagcgtgagctctgaaattaatctgcttagatttgaatcctgtctgcaacattttagctatggggccttgggcctcagtttcatcaaccagaaaacaggaatgatagcagtaattacttcacaggctcttgcggagttcatgaaataaatgcgagtaaaatactagcctagccctagcacatagtaaccactaaaaaaaaaaacatcattgcaggagaggggaatctctagtgccttaagaaaggggaaagatcagccgggcatggtggctcacacctataatcctagcactttgggaggctgaggcaggtagttcacctgaggtcaggagttcgagaccagcctggccaagatggcgaaaccccatctctactaaaaatacaaaaattagccgggcatgttggcgggcgcctgtaattccagctacttgggaggctgagggtaggagaattgcttgaaccaaaggggcggaggttgcagtgagctgagatcgtgccacttcactccagcacgggcaaaaaagcaaaactccatcaaagaaagaaagaaaagaaagaacgaaaggggaaaggcggaaaggtcaaacataaacttcagcatcatatactaatgctggaagggagggtggggtaggagcaggaccccatgcttctctggctctacttctttcttaacacacctttcttcccccacctagaggataagcgccttcaaggaaggcatttgctttttggtaagctctcaggtccctgacatgtgacttggcataaaactttggttcagtcaatatttacaaaattaattgaacaaattaattttatctctcttgcctctgtgcattccagatatcaaaaagaaacaccctgcacaaagaaagtcctctaaaggtagcttgtctcttttcggctgcagtaatatttgcaaagggagtcggtatccccgcatatgccaaagtgccaacccaccaatgtggtgtttgctgccattgagagccagaggtgcttccttgtagaggctcaggggttctgctctccagagatgtgagcagcttcaagcccacccatctccccaagttgtgggcatatgcctgtccaggggtggcagggagggagggacaaaagggccaagtggctcccgtgaaaccccaaaagcaagtccacgcacagcaaggagaaatgagtacacactttatttttagccacgcatgatggaaagttactctgggaatggtgcaaattttgcttcatcaccctcggtacctttccaggatcctcagtggcttcccagggaaatgactgataaggggacaaaggaatttctgaggttctttcagaggtggagaggcaggagacagaaacgacgtaaaacaaggttggggagaaaaaatggactccatgaacacccaggacactcccataccagcccagagggctgcaggctcctacaagtaggtacagccccactggctaagaggaggcagaaggtccccaccagagccaatccaagaaacaaggctgtcattccactccaccctgctggaaagcagggcagtggaaagaaccaggctatggaatcaggaacatctgaatttcaatcccacctctgctgtgttttgagaccagcaacttaagttcctcaagcctccattccctcctctgtaaatcggtgctgccaaactgagtcgctctccaggccagtgaaacaatgtctgcatagtaagccggctggcacctggtgctggattaactctctttccgcaattaaactgaggctcaagtagaggtctcccaaggccctactgttgtgtggtcttggcaaagtgctttctgttctctaggctccacgtctttccacctaccaagacaacatgttggcagagacctttcaaggtccctgcctgttctgggatgctgctaagcaccctggccttgtggactgctggccagacgtctcccctttaatgtgttgggggctccactctgaagccatatcctgacctcacagtgggcccataccttgagaaaccttaaaaaattacagtgatttctgattataatgtttatttccttgccttcacccaaactgcatccatgggccaaagagaatagatgccgacctgccatccattcattccacaaggatttactgagctcccatggtagtaagtgctgtgctgggcaaggatgaccaagggcaaaagtgaacaggacagtaaagaggatagcccagtccttaccttcccagagcttaattgctacctgccgtaaaatatgttaattcctttattatggttgtggaggaaacatgtaccctaaaacttaaagtataatgattgaaaaaaaaaaaaagaagtcctgggagccaagtgggtacatgacaggaggcctgacccagccagcgggccggacagggtccctaggaagtaccctgtaggctgaggtctgaaaaatgagcaggtactaacctggagagcagggagagagagagggggagagaagcaccttccacgcagaaggaacagcatgtgcaaaggccagtacctggcacttctgagaaaccaaaagaagcccaatgtggctggagggcaaagagggaggaggctggagggcaaagttgtccaagtcagggctacgaaggcaggctttcaaaatgcggactgacaccacactgtgtaaggccacgcgcagagggatttcctggaatgtctggatctgggcaaagtttccctgcggagagcaccaggagaggtactgatggcccaaggcacaggaaagcagcgcagcccaggctgcagagtccaggcatccaggtctggaactggaaggtacttcgcaaagtgccctcctcaaatgccctttccattttccaaagggtttgctccactcctgcccccacgcccacttgtttcacttcttatttttatttgtttttaaaccagggccttcttacggtcaggttaatgcatttttaaaaagaaagccctgaatgtgtggccctccctccctgggaggagatgggtggatcaatagccctcttagctcttcctctaccaccagcagtgaccagagcagtgggtggggccagggcaggtgtgggctctctgcaaagtgggcctgagagccaggcatttatgccttccctccccaccccctcccattcccaggcaaggcctcccacaccctgtccttcaccacctaccgtggtaaagcccaggaacaaaagggacagactgggggaaggcagagaacactgggcaatctaaaaacccaagttcaatctctgctgctcagcctcttagcagccttgaaaccttggacaagaaagaagctaacctccctgaacctcagtattcttaagtaaaacgtggggatctgtgtaaaaattatgtgaggtcatgcggaaaggcacctggcacaccctgggcaggacccttccccgagtctcccacaccccagccctctggatccactctgttatcacagacccttctgctgcctcccctcccagtgagctgacacgctttgagcttcctcaagggaaaacgctccccgatgccgacagatggggagtcctaaaatacagcgtatggatcatgtttcgtgactagcaaaacacgccagccgggacactttgagaacccggccggttttcaggaacaggattttacacatttcccaggattggcggatctgcgctcgcctccacccgcctgcgagctccatagcccggatcctgtaccagggggatacttaggacaggtggggggaagaggggaggctgtgccctaaccctctgccgcttttcatattgctactaccatttatgtattgaacacgtgatacattcctcgctgcgtgtcaggtgtttggcatgtgttctgaagccaccctgcctaggtccccatcctggatctaactgtacggccctggacaagtcacttcatctctctgagcttcactttgctcatctgtgaacaggggtggtagtaccttcccctcatggggccagggtggggactgggtgaacaacatcagagctcagtagacatgaactgctgctataatcaaaccacacggtgactatcactgtagctatcctactgaaggtaaaacggacactaagaggccatgccagctgtccaggccacccagtggcaggggagcaggtctgcctctgaaggggatcagggatgggcttcagagggtttgcaaaccccaacccctggccttatggcgcacaattatttgaatacatgtgaatgtgcagtgttcagagaggagggcaatgaatttcagtctcccaggtatctacggccccataaaggttacaaaccatggcttcatataactatatctacttgacacacataaggtcaccctggcacagcagtcctgaactctaggatctggagcaaggattacaccccaccccgtctacccaaaggaaagacattggttcttggcaacatcaatcacaaaaagctttggaccaggagaaggggctaggagagccactagcagggaagtgtgttaacacaggttccggaattttagaagaggacatgcaactcaagaaactgaggaagagtagtctgtacttccatgggatccaagaagacccgaaggagaaaaagaagagatggtgggaagctcagtacctggcaactgaggtagcacctgggggtgcggggcatgatggccaagaggtgcccctgattagacacctgggctcagtcactccagtggactgacattaccctactggacttgagcttgtaagggcagagaaacgttgaggaaaaaaaaagtcacaccaagacatgaatcaggatatgaacaatattaatctttgagaagtggaattaccagagttttgtttacgtttattatctaatttccttcacagtgaacatatatcatatacatccactggaaagaagacacaaaaccaatctacttacaaagacagctatgcactgcacacagtcttggcataataaatacttgtgcttctgcccaaagtaggctcttgaagcccccttttgagaatgaatgattcaagccactcccagaaaaggtatcattttgggaatagagaatggggtgattcgaatatgttcaagacacttctgtgggtgattcatttaggggcataaagatgggctctgcttccccgtgatgactgctggggcagctaatcccatcacctcttaacacactcggtgtcgtcagtacaggcaaggccttgtaaagagaggaaagaattgggggaaacatccgatcaatctttttttctgtttttgtgggtgggaagaaaggagcaaagagatgagagatagcaacagagaacaggttctcaggttgggtggttcacacttgtaatcccaatgctttgggaggccaaagcaggaggatcacttcagctcaggagttcgagaccagcctaggcaatacagcaagacattgtctcaaattaaaaagaaagaaattaacacaacaaggtctcccactgcttgagcgcgtcgctggcagacagtgcccattagtccacgtgcgtacagctgtaaattgcatttggtgcgtgtggtttttcctcacagcactgaggagacgtataattcagacttcctatttatattacacttgtttcctccaatacaatggctacaaatgctttctactccactcctgtcatctgtgcggaaattctcctgatacacggggagactagaaagttacaagagttctcgtgcgtggccagcaggctcagtctcagttctctctgctcggatgggaaacttctgcaagggaagaaaaagggctgaacccagccgttagaaactaacttacacttggcttcttcatgcttatccactgcagaaacacaggagcccccataaaaaacatccttattgacactacgcaatatttgcccttccaataaaacagttcccagctaccaaggcagcctggaagagaggacaccaagagccgcactctaaaaaccacccgagtctcagccctcccatccagggaaaagaccaaggcactggaagaacctctaagcccatggtcccagctcctttccccacaccttccttcagagagaaggaagagtaatctcacctgagccagctggcctcaaaagtaatagggcagaaaagaaaagccttccgcatttcaaaggccctctctgaagtgcttgcatgaacatctccttttaagatttcctttaaaatccttggtttccacagaagtaactagcgtctcaccccaaacgccaagcaaagtctctgtgcctgaccaagccctgaccatggcacagagcagattcctaacagaagattactgtactgaggctgggcgcggtggcttacacctgtaatcctggaggctgaggcgggcagattgcctgagctcaggagtttgagaccagcctgggcaacacggtgaaaccctgtctctaccaaaatacaaaaaattaggctgggcacggtggctcacgcctgtaattccagcactttgggaggccgacgcgggtggatcacttgaggtcaggagttcgagaccagcctggccaacatggtgaaaccccgtctccacaaaaatacaaaaaaaaaaaaacaaaacaaaaacaattagccaagtgtggcagcacacgcctgtactcccatctactcaggaggctgagacaggagaatcgcttgaactcaagaggcagaggttgcagtgagctgagatcgtgccattgcactccagccgtgtgacagagtaagacttcatctcaaaaaaaaaaaaaattagccaggcgcggcaccatgtgcttgtagtaccatctactcaggaggctaaggcaggagaattgcttgaacctgggaggcagaagttgcagtgagcctagatcgggccactgcactccagcctgggtgacacagctagactccatctccaaaaaaaaaaaaaaaattactgtactgactaaagttacagagtagattaagatctttaggtccccttgtaacaggaatttgaattttgatttggggcctggcactgtcaccctatgctgggggttgaattgtgtacctccaaaagatatgctcaactcctacccccagtacctgtgaatgggctcttatttagaaatacagtctcctggctaggcgcggtggctcacacctgtaatcccaacactttgggaggccaaggcgggtggatcacgaggtcaggagatcgagaccatcctgactgacacggtgaaaccccatctctactaaaaatacaaaaaaattggccgggcatggtcgtgggcacctgtagtcccagctacttgggaggctgaggcaggagaatggcgtgaacccgggaggcggagcttgcagtgagccgagattgcaccactgcactctagcctgggcaatagagtgagactccatctcaaggaaaaaaaaaaaaaaatagaaatacagtctcctatggcagccttgggggattgggtccaggcccttactccccaaccccacctcacagataccaaaatcctcggatgcttgagtcctttacataaaatggcagagtgcacacacatcctcccatatacattttaaaatttttttcagacactgcaccaggctggagtgcagtggagtgatcacagctcactgcatccttggactcctgggatcaagcaatcctcctgcctcagcctcccaagtaactgggactgcaggcatacaccaccacacccagctaatttatttatttaatttttacatagagatggggtctcactatgttaaccaagccagtcttgaattcctgacttcaagcaaccctcccaccttggcctcccaaagtactggggttagaggtgtgagccaccgtgcccagccctcctatatactttaaatcatctctgggttacttataatatctaatacaatataaatactaggtaaatagttgttaggctgttttttaatttgtcccctttttaaaaaaaaaaaaaaaagatggggtcttgctatattgcccaggctggtcttgaactactagcctcaaacaatcctcccaccttagcctcccacagtgctgggattacaggcattagtcactacaccaggcctgtattctttttgttggtttgtttcccctgaatatttttgattactgaatccgcaaatgctggctgaacctgcagatgtggaaggccgattctacatccttttgcaagtatcacttagcaaaaatgaggtgatattggattagggtgggtcctgatgcaatgactggtatccatatgaaatgaggggaatataaaatgagatgcacagggaggtgccatgtgatggcagaggcagagattggagtcctaggggccaaggaatgccaaggattgcagcaacgctggaagataagagaaaggcatgggcagatgctcctctagaaccttcagagggcatggccctgcgggcaccttcctcgtgaactttcagcctccagaacattgagactaagtttctgttgtttaaagccacctagtttgtggtactttgttactgcgtctagaaaactaacaggtctggaaatcattcactccaaggctctcaacactctcagccacccaatcacccacccctttcctcactgtgtgcactgttgccacttcaggattatatgactccgtgcaaccaaccacgaccttctgcaaacaccatccggagaggtcagagtccccatatccatctggggacagagacacaaagtcatctttatcgggtggcggactctgcccctcagtccgccaactgagaaccgccaaggaaagtctgaggtaacccacaaggtttgggaaatagaaggcatggggggcgggggggggggggcgggtgaggacaggtggaaattagcagagagtgggcagaaagaaagagaaaaaggaaaaggttcaaaaaggagcctgcgggtcaagaggacacacaagcaacaacaggaagtagacatcctcctgccttgccccctcagccagtcacatgcttctaactttctccctcacacacctgaggtctgcctgggacagcctccaacagcctgccaaacaggtgacacccagagcactggctacccacacagctgccgcacttcaagctcccacagtgagaataccagcccacttccgtccaggggttgggctttatttgttttggatttccaataccggggacttgctggggccaagtcaatactggaaggccaaggagatggctgggcagatagatgtggtgcaaggttctacacgctgcctcacctgtgccagcttagggtctgtggtcatggggcagcggggcagatgcatcccactcacttccccaccatagatacagctcagatggaggcaccaatgtgcctggaagagcaaggccaaggccttggaagtgagttcacagggctgcggaagtgagtggcctctaaatctcacctcctctccttgctctggcactcacctacactcaaggcaagtcacaaaattaggccggtaaagcctgggagaggtagcctagtgtcttgttgagagccagaaccaggctaaaaacccagcccgatgaccagcaagctgctgctcttcacccattcgacaagaaacaggtaagcacctacccattatgtgttctcagcagcctcgtctgcaaagataagatgacaattacctgtctgaacaaagctcttctgaggatggaacatgattaacaaatataaaacacccagcataatgttgggcacatcaaaaagagccactatggaggagagattagaattattagggtcatatcttccaacccagagcttgagacccaaccaggtctctgtaccatccaccagcatgtcagctccacaaggtaggcagggatattcctctgctgttccctgcggcattcccagcacctacagcggtgcctggcacacagtaggcacccaaatgtttgtttgttatgtgagcaaaacaactgccgggcatccaatgcccttaaggttagatgcagaaatatcaaaactgcatgatacactgaccatcttggggacagaagagcatactatgaagttatgaaacaagcagccttggcccatatcctgggaacaaaaggctactggttccccccaaatgaagccaaaatcaaagaggagaccagcacagagctccctcaggcttcagccttgaaaaggcatgttggcttttacaggaagcaggtaagggtttagccatgccaccttagtttcgctcatgaaatgatggctgggggtcacaagaggtgggtatccaatgaggaaacagtgtggatgggccaaaaaaaaaaaaaatcaaaatcattattttacagatatctttttcaagaaatgcctcccgcttcagctgggattcatagccatttcatcttttaactttcctctcctctcctcatttccattttaggttcaaccttacctggcgagtgtcctggaatacataacacaaattgctggcaatctggagcccctggtacatctcccacctggggtccctttagcctctgctgttggctgtcatttgaacccttctgccccaaattaaaccgctctaaaccccaaccctgggtacttaaccagaaatgcctctaccatttccacctctattggctgtgcctcacctgccacgccaacctgggactatgaaaacccaccaagatatattaagtaggagcatccacgtgaaaaggcatctcagcagagtgacagtgtgaagatctgggaagctgaagccttcaccgctgcttccttttaggtggtgacctgagaacaggttgcttacactttctgagccccaactgtgccatccataaaaatgggcaaaataataatagtgcctcccaacagggttgctgtagagacaaaacacaagagcagcccctgaatgcttctttttgaaagtgcggaacaagcgctgttactaggaactctagtctcctttctcatccgtggaagaggtacaagctagaaaactgtgccaagcacaaggcagccctgcaaagcagaagtagtcctgtttttctcaagtgattaacaggtccaagaaaggctgtggtgagatttacgagggccacagccaagagagatttatacgcgtatggccttcagatggttttctaagacatgtgcacaacccgggtttggctgaggagctcagcagcaagtaattttctaattgattcattagcactccaatcaactactactttagacacaaaggccttgcttgggtctgaatgtctcagcctgggaagctgagctgaataaaccattcttgccctgggggcagcagcagcccagggacaggcaggagaacccacaccatgaccatccaaaaatcatatcaacgtgtaaataaactcaagagtctggacacagaaatagaacccgcacagcttctcagatgcttttttttttgagacagggtctcattctgtcaccaatgctggagtgcagtggtgcaatcatagcctcaacctcctggactcagcaatcctccaacctcagcctcctgagtaggtgagactacaggcacgtgccgccaagcccagctaatctttttgtattttttgtagagatgggggtctcgctatgttgcccaggctggtctcgaactcctagctcaagcaatctgcccacctcggcctcccaaagtgctggcataacaagtgtgagccaccgtgcccagccttaaatgctattttttataatgagaattttctgaccagaagaagatgatgtgaaaaaagtaaagtaaaagtaggaaaacagcctgaaaagaaatactcgaaaagttagcacaaagttagtcctggtggtgggtgactttcttttcttccttcctcctacttttcaaaatgaacgagtacagaacacataacttcttctgttctctcaggtataaaatggcagcaattataccccattcccaaggttaccggaaggatgaaattagattatgtatgaaacaggcagagcctgaagagccgggggtgccagaaaggctgacccaccatatcagtgactcacgggcccacctacctcctgggccaaaattcaagttatgctcaggaaggttataaatgactccagtcacttatgaattgttgaggccacaaatgctaaaagtcacagatctcaagagtaatgttatgataatctaaatataaatgaaactttaacaacaatcttccttcatcttttcatgttcctctggcgtgtgggatattcacctaagacagggttcctcaacaggccaagctagcagggatgaacctctagcagattactcccacggagtgacctcgctgggcctttatgggagcccctgttttgggaccggcttgctgcctgtacaccagctgtagaaacatccccagtgccatctgggaaggactcctgactcgatctggcccagctcagcacgctgcctatctatccatccacccacccatccaaacatctgtatgtttattctccagaaggagctcctggtgagctaaagagcagtgtgaactccagcaaaccaacaggcttccacagcatggaaggcaaaacacatgaagacccccgatcttggccaggcctggtggcgcatgcctgtagtcccagctacttgggaggtcgaggcaggaggatcccttgaagccaggagtttaagacctaactgggcaatatagtgagaccctatctctacaaaacaaacaacaacaacaaccaaaccccacccccgccccccaaaaaaaacagtcccctcagtctgaagagccttgggctagacacggctcagggtacataaaaggaccaaaagcctaaaacttcggaagcagcacaaggtgccttaggaagcttgatagaactgattcaagtcctacttcacctagcagggaattaccttgttatcctactaagtggcaatctccagagaggccaaatggatccaaacttcttggctgactggtaaggtggcttcttcaagtgacttctccataaaacacccctgaggaaccttctgtcagaaacggtccccactgggtcatcccacttcctatgaggcttcatctcagcttcaaaccccttcctcccctgccttcacctcccagcctccagaagagaaagtcatccatatggggtcttactatagtaatgttaatggaacaaggcaaggggagggcgggatggccgtcatctcatgagcctcaccttgcaggatgtgcagcaggaagaagctgcgtcttgccgtttgaccatgcgagcatctagcgtgatcagcactgtgctcactgccatcatcaatgctaacagaaacgtgcagacaacacaaaacctcagaactcccatctcaatcaactgctcggaaacttcaatctgagagtaaactgtcatgtttttcccactctaaaacaggatgactaatgacagaggaacctcaacacaatccatggggctcaagccagatccctctcaacagagcacaaaagccacccagtcccaaaaaatgtgagccgacgccgggcccctcaacggattctgaatggcaaacccgagaactgcaggagagacaggaggcagtaggtgacgcggggaggcggcccgaccggacagcgccgtgtcctcagaccgtcatgccatccccttggtttcctcgcctgcacgggggctccagctgcaggcgctccctggacaggtccccacacacccctgccacagggaggacaactctcagagggccccagccagttttagagctggatacacaagtttgttttatttattttgcatctaacaaggccctgacactctaattggaatagggcagacccattctttccgtcgaaatcaggcccattgcgaggggaaaaactgcaggccaaaatccaagctgaaagggtaaactggaagatcacctctactttcagatcctacaggttccagaaaatcttcagctcaacacccccgctcctgccctgtgacttacacacatgtggccaggccatcctcagaagcttcagccttaaagatttttccctttgctcctctgagatgtatccactctgaaaaaccctgtgcaccctctatgctggccccaccaagtcaagatttctcccagaaggggaatgggagtgttttcaagtatccaggtgacccaggtgcattgtcagatcccaattctggccaccctctcacatgctccatggaagtcagagaaaaacaggcagggtcagaggctgctctcgagggctggcctgccccatcctactcatgctgcagcccagggcaaggggagtggcattcagcaaaccctgtggaactacactgaatggggcaaaattcacacaagccagataaaccctaaagccaccttctataccaagaaaccagtctgaggtccagcaatgcatagactctgctgagatctctctttccatccagacatgggctgagggactgagagggactgcagatgatcaggtcagcaccttcattctacagatgaggaggagactgcagcacagaggggactgactccccaaatcatacagggactagaaaccgaactggacccagatccagggctgtcagtgactgaccactcccccggctcagcaagagcactcctacatcccaatgctgcaccaggatgcccaacaaaagatgggactcccatttcactatctgcaacctgatcttatctagaaagcctggagccagcgcataccactgtctgcagactctacagccttacaaggctgcctgtctgctctgctttctgcagcatcagtgcacctcccagcccctcaaactcctacccatcaaaaccacatgccagcctttcccaggcacctgccacatgcagggcaggtggacagaccagcaatgacacggtacagtgaggcaagtctttccacccaatcccacaaaacataagccaatgctgggaccctcaatggactctgagggtcaccccactgaacggcaaacccgagaactacaggagagacacgaggcagtgggtgaagtggggaggtggccctgctggatcctagagccccaggagggtacacactaccactcttgtcatgtggttctcggcgttcacatctaacgtgggagcaaggaacttccacaaagacctgctgggcctctaacacacagacctctcccccaggagcttacaaccgagatggggagggggagtgagccacctgaagtcccagtaagtactctaagctcctctccagcccactccccgctccctcacaaatcccaggaacactaacctctccaggggaaagaaattcaaaaaacaagaaacccaggaagccaaccaatcggagatccctgtgaacctgggcctaatgtaacacacaactctgtgttaagacacggtgccttagggaggagtggacttcagaacacatcatctgtacatgccatctacccagcctgtggacttcccagtaattacagccaagagcaaaggggtagaaaagagaaaggtgaatgaaaaatcatgaatgcctcatgcctttccaaggccagaagactgcttactgccctcgacacaaggtccctctaaaaggaaggggagggtgaggctgggttgtttcctcctcctctcctgctcttgctttgaaggtccctcacacaatgggaggctctcaggccaggacaacggtgtgacctgccccttctctgcaatgcctgccacatgcggcgtccaacaaacgtctgatgagagaatgaatgagaccaggcactctctgtcctgttcctctctgtgctgggcacacagcagacatgaggctactgtgctcaactaagccgaatttctggacaatatctatctggagataaatacaagaggagggcaccaaccacagacattacagggagatctcccccaaatttattttacttatttattttttgagacagggtctcactctgtcgcccaggctggagtacagtggcacaatcttggctcactgtaacctctgccttctggttcaagcgattctcccgcctcaacttcccaagtagctgggagtacaggcacgtgccaccatgcgtgactaatttttgtatttttagtagaaacagggtttcaccatgttggccaggctggtctggaactcctggcctcaagtgatccacccggctcagcctcccgaagtgctgggattacaggtgttgagccaccgcgtccagcctctcccccaaattcagagagctcccctgcctcccaaatttaaggaggcttcttggaaaactaaaggagttatcttaaagtcctcctaaaaagccagtccctctttacgtgaggtggtgtttcaagaaggcggctattgtatgcaggagggcaaacccctgcgtacatccctctatccacacctcccgctttgtgcgaggggacacgatcccacgtgagggctcctggaacccagctccctctcctccgcccaccctgcctggccagaccccattaacgcagtgctcgtgccatcaacactgttgttttggaatgtgccagtaattctagtggcaggaacagcaagctttaagctcagcagagaaaccagctggagaggcagcctcatgaaataatgaaatgccaaaccaacccctacatcttctccagtctctcaggtcacctaccagattagaaggcctgttgctacggcaaccatatcttgcaagtgccggctgaacttccccataatttttaaccctttaactagctcggagagggtagcgtgcagatgagcccaaatcccggggagctggcctgctctaggtgcgtttttacaaattaaagcaagaaaaaagaaaaccagcagccagggggaggggtgaaagtccacagttgaacaaacagacacggtgcaaaggaaacgccgcacacttccacctttccttcccgccagcgccccaccaaacaacctgatcggccacggcgcagcaaacttttcacgcacctggcaactcccaagcgcaggagctgcaaaggagatgggaataaacaatggcaaaatggaactgtgcctgcccctcccggccaggccccgtgcccttgtgctacagaacagcgcgggcccttctgtgggaagcagaaggcggccgggagctaggcggcggggacagatggccacgcaggcactggcactttccagttgtctgatgggcgccgtctgccaaacaagccccccaccgcctcgcagccgctcccaccccaaacacagagcttaggagctgcaaagggagccgacatccaaagggggccaagcacgggtgccccaggagccgcttctccctccagcattctacccacatatctacaagtcatcgggtgtccactcgccttctctccatttcaggaagtcttcctccacccgccccacctgctttgtgctcagcaaccagcgttcaagagatcttcaaagaataaatgtagggactttcctcagcctcttggttttgacaagacagacttcataaaatcacacagacgcagagaaaggcctgacacagtctcaccgctgggggtagagcccctcacctcactccacatcttctgggtggagggaacagggctcacaggggtaacagaggcctatctggtttccccagagaatcaaggaaaggcccctaggaagggagggagggaagacaggaagagaggtctgagtccccagtgagaggagacagaaggccaaaggggctaggaggggaagggagaaaaggaaaaaggcagtgcgagtgaggaaggcagccaggcaacctgggacgctaattaaaggctttgcagcaatcgtgactgcctaacacagtggcccagggtgggcactcgacaaatgaggccaccctgctacacacagatccacacccccactcctgacaaaaagctaggggctcacttacaaagtcaggcaggcaggagaaggaaggtaggtcaatgtgggggtgggcagtgcttcagtaagttttttgggggctgggggtagggtgtaccataagggtgctagcactatttgtgaagaaaagagagaaaattcaaccctgcacatccttgccacctcatcctcctgctccccagccagccccaccacctccacctctcccccatccacaggggacccatggggtgaaatccagtccagtgaattaaagtcctaatgtcctaagctgcgcacagcagtgcacacctgtagtcccagctattcaggaggctgaggccagaggatcacttgagcccaggagttccaggccagcctggttaacatagcaagaccttttctctcacaaaataaatgaagtcctaatgtcttctttgccaagtaataagacacaccacaaatggcctggcacccagggagcagggatgatttttgctagcatgttcacctgcctcccagtctttccacatgcacagcagtcatcaggttccagaggacccatcaaaggtggactctccaaagtaaaggaagatggacaaacagcacttccacacctacactataccatccaggcatgagggtgcagtgttcttacagaagggtctccttccttaatccactcgtgggcagggctgagacagcacctcaatagccctctgcagcatctgggacaggacaggagctctaagaacattttcgagctaaaaaggaaggagctttttccattttaacccaccagatgggcaggctgccaccaagcttatcttcattgggcacttaactatgtgccaggcactgcacatacaaaatgaagactaacacgcctgcctaacctcaaggagtacctcttaactggcaactcaatgccatactctgaccgggctccatttctaccttgtgtgcaacagaccctcagtatttagatacggtggactcttgggggcttatcaggtgttcccctgaagctgaaccagcccacccagctcaggaggccaggagggcaagggcagagtctcagggcttctgtgcaaatcccagtgccggctgactggatgaccaactggaagcttcgtgagcaactccacaactgctaaactacagaccatttctccagggttgcagctcacaccttgctccagggcttccagctgcttgacaggagaaggggagatggcataacctccatcccctgggcctcagtatcccctgctggtaaagtgaggaggatgcccagtctgacctctgaagacatccgaacgaacaacactgggagaccagtaccatcctagctggacagcgctgtggggacgatggatgcaagagaggattgcaagtggggagggcatcccagcagtgtgtccccacctacgctctcaacgacacagggaaattccgcccacagctctgaataatcaaagaaataacatttaggtaaggttggggattaagctaaacctcacttaagaggcagggatgttggcatttgggagcaggaaacaggcctgggaacgcagttaatacctaccacagagcaaagcggatcaccgccagctcctgactcaagagcgtcttccacccgccacacttctccctctgccaactccaggcgcttcaaaggggccaggccaaaaagtgggggttggaggtcagttgtggaagtcacattatcagaagaacattggcaaaccagaagccagggagatgccttccaaaacagaacagaggctattttaaacgtaaacccactggtggaggtggggagagttttatgggaagaacagagacatatatgagttgctataattaccctcccctcaaaaaaaaaaaaaaaaaaaaaagctgtcataggaagaagtcttcccagttggtgatggtaatacctggaacacagattatagctgctctgtctaaaacagaaatgggctaccctgtctggtagtgagttccccatcactgaaggtaaagcagaggctgcagaagaaaccagggccagggagactctcatagtcagaagggattttagaggttatcgactgataaaatgctaatgggaaaataactcaaagcccttcacgctttaaaacagtctttcctttaaaaaagcacctaggattcctacagaggacatggaaaggttttgcatgccctcactgacctacagagagctttttataaacataaggtttccctggcatccttggccagactccacctactcttcttcccggctgtagaggtcactgtgtttttgtggcaaaagctgcaggtggtgacagaaatgctggataagtaagaaaagctgttatgtaaaaactccaatgtttagggcacttccgtggagcaaagaatcagaaaatacgtttcagagagcagaaatggagcaggtgagcattcatcatttcaggagggtgcgatgccatcttggtaccccacagcaacaccactggcctgacaggctgaggataaatggggaccaccgtgaccagttaacactcacctaccttgaagaaatgttcagatcatgggttgataatcaccaaggagtcaaaccatgacctcccaccactactgggtgtgtgactcaaccgccaacaccttcagagtcttgttcacttgcaaaattcttaggacctagaacagtacctgacatataccatgtgctcaaagaaataaaaagaatacatattaaaaacaaataagccaaccaagtatcttttctctcggttttggaatcaattacataacttctcttcctctgctgattcacctatctccttcagttcaacccaaaaaacattatactaaaattactttgcattccctgagtccacagagggacaaaagagctgtctagaagcttagggaggaagaggaaagttagagcacagaaatatggaaacctccacttgagctccccgaagatcagaatgtttgtcttttgttcattgctttatcatgtgttctaatactggcacacgataggcactcaacaaatacctaaaagaattagcaaacaaattctctgtccaatcttggcaatcacttcactctctaaaacatctcttctcaactacagaataacagcgctggaaggggctcaggggtccccagccagttctaatgtatctgaaagcctgtgacccaggtaaactggcctgggaatggctttgatcacagaaagcctgcatgggtccccccaagtgtttccaccaaagaaactaggaggcagtgtggtgccataaaaaaaagaacccaaatttaaagcccaaaatgtttaggtaacagctttgcttaggacacatgaacttggggaagttactgaacctcctcgagtctcaatttcctcacctgcaaaatgggggaccatgccccaggtcatagcctggattgtaagataatacatgtggccaggcacagtggctcactcctgtaatcccaacattttgggaggctgaggcaggaggaccacttgaggccgggagtttgagaccagcctggacaacatagtaagaccttgtctctacttaaaaaaaaaaaaaaaaaatctgccagatgtggcaaggggtacatgcctgtagtcccagctacgttggaggctgaggtgggaggactgcttgagcccaggaggttgaggctgcagtgagctatgactgtaccactgcattccagcctgggaaacaaaatgagaccctgtctcaaaaaaaagaactaactaagataatgcatgtaaaagcagtttgcatagagagtgagcctccacaatccctcactcacagagggacctacttcatttccagctctaaaccttacaattacttctaccctagaagggagatgctaattcaggacaaaggataatcaagaccagttcacaagataacgttttatgaaaattcacatcctgtaacctggcctgtgctaactataaagaggtaaattttcataaaacctaattcatctagagttttttgctcccttctcaggaaattaaacagatagaggtttaaagcagaaatggggaaacgtggaaaaccgaacaaccctaaaaagaaaagagcccttccgaagctgcagatgaaccccacacgcactcccgctgagtgtgggataagcagagaaacactgcccccaatagagcaaggccctcccaggctgaacggaattcacagagcctcttggataactctggtcctgagcagggggcctcagagaggaggtgcggaacctgttctcgcagaacgtgggatatccccttgcgctccccaaagcccggcagcgagctgaacaagcaaggccaccatcagtggtatctatcaacagagcatctacaagcagcagacagatgtgacaaccaaaatcaagacaagtggcctttccagacatgccagatacactcaacctccccaccaccacgatgatactactggtcaatgtggattctcatttaatggcaaaagccctaatttttaactgtccctgactgggaggtgttgtcatcgtccttccgccatgggttcagttctcccttcctcactgaaagagggtgcaaccacagaaagctctcccagaaagagactggaggcgtaattttaaaagttcaggaaggagaggtattaaagacctggcaaagatttcttgggtggtttaaggcaaaattcagaatttgtatcttttcattcccagcctgccatcttaattatcttcatgcccatctttaccatcatggtaaggacaagcgtaggagaccacaaataaacacacccacacaaacatctcagcaagaaagatctctcccttttctcagtattcattcatctcctcatgctagacccagagctcccaagagcgagctcagtaaccctgccagcagtggaccatcctggcagcaagcagctgctcaactaagagcaaatctccacatgcccaatatgtggcatcagccagcatcctttgagacagagcagtccccagggtctctctctccacaaaccatcctctcttccccaagaaagggcctggcaaagagtgaagggcccccaggggttgctttgtggaaagactgacttagtgagcaaatgggatcagaggtacccaggtcaaatcctctttatggccacagatagtctacttggtgagtaaggacccagaaggcggaagcctctacccgacctgggctcctccgggcagcccctacataggcgcaagatattagaccaggaaggaacactcagtggtatatcccccaccctataagctcccggccttgaaagcatctgaaaatagcaggcccccaaatctaacctttttcttagaccaggcagatggttttattcatgtaagttctagtttaccttcttaagctgtctaaacatttgtctgagcatctgagccacacgctagactgccctggggattagtcctgctttcagtggtgggctgttgttgttgttttacccctcgttttctctcccagataacggcgaggacaggcatttataagagctgggtgctgcccaggagttgcaatctgactggatggaggcctgggagatgaactgtctcacggggggcggggcagagggatacttagacactgttgtcttactaagactccatatttacacagggagtcttggaaagagggtgcagtcctcccagcctccatcagtgtggatagaatgctgtctagaggtcattcctgggatgaaaggcaccaggcattaagaagcccactctagcacagcccctgaacagctggatactgtttgctgagtcacatctcagtttccaagggaaaatgacagacactgctcatcacagccacatgaactttcaatccagaactgcaaacctcctaaccacacagtgccttgtttcaccaatctgggaaatggggacaagggtaccctctccctaccagccatctcaaaagggaagacccacacagctctcagcaatggtgtgaatcatgagtatttcttcacctggagaaaaagtacttagcacaattcaaaagtatttagcacaattcaaaattatgacagatgactatgctaccaaatcagcaatctgatgccacatcggacagttataaattagacaagtcaacaaatttacccttcatttatactctacgccccttactctcacaccaaccacaatcttctctggccctcaaagaaatagactgaaaaataagttatatgggagggagaacaacactattacccctgaaaccaccccctgcaccatcatttttttaatgtaaaaataaaagtcccccaaaaacaaaacaaaacaaaaaaccaaattttaaaaagcaaccattgtttattttctttccaccataaaggtatactgcagaagaaatgtatagggaaaggtatattgttttgtggtagagactttccttaatcggacttaaaataggatttaccaaatcttacaactcttcaggaacagggtgatttgcatagagctaggcacacctggctccctagagaggcctggacaggccacctccccagcaaccagaggggaaacaaagggggcagaccagattcatggcaaggccaggcctcaggagggttcaggtgttggtccctaattcaaagaagaacttcttcctttacagactagcctagtgtatgagaagacatcatggcagccaaagagaacactctagagcttaggttggcaaaccagtaaggcccaagggccttacttataccacctgtatttgtaaataaagttttattgggacacaaccacacccattcatttctgtcctgtctatggctgatttctatgctacaatggcagagctgagtagttgcaagagagactgcacaacccacaaagcctgaaatatttactctctggtcctttatagaaaaagttggccaaaccctactctagtgtcaagtacattccatcacaaaggctgccgtaatagacaggttccaaagaataaagacagctagttcagcacctctactttgtaaatgcttactgagacccagagaaggggagatgacctgccagagccagtctgctagaaggactgaggtcccacctgcctcccaacctagcactctgtttaacaaagaggaaggggtgaggcttctcaaaacaaaacaccagcagcaggggaaaatataaatagaatatcaagtcccacaaataaacattaatgcttggctcaagcttaacatgagaaatgtgaaaaatggggaggggaagaagagcacatgggatggtctaagcaaactaatatcccaagggcagcctatcttcagccctttctaaatacccattccacacacccaaaagcacgtgtgctaatgatcaatcctgcctctctccctgcccagactatggccactcctcctctcagcaatgatggtgaacttggcagtatcgaacccaaacagcctttctctccccattacctgcaacgtcagcttttctgcttctcacacaactctgcccgtgaatagtccaaactagcggggtttgtgctacattttaacatttcaataattaagacctctcccaaaaggaatgcccagcacttcccccaaaacagctgtggaaaatcaggctgagagggaaatgcagatggagaggccccaggcctgcacagaggggcaggagggagggaagaggggctgagaaggagggtcagcaacaagacaaaggcgccgaagagctttttttgcacccgcaccaggaaaacaccagacaatgtgaatggtgcatggagatgaagcaacatcccaaagttaaaattaattagctgccgtattgacagaggctccattgtgccatgcggtgaagcaatctaagagcgagggcatcacacacaatgtcgaaaggcccttggcagccacaggtacgacagggtgaggacatgctctatcgtgtcaccaacctggttccctgaagaaaggtgtgcgtgtgtgtgtgtgtgttggaaggctagtggttaagaagtgtcagtgttaagactttcttaaattaatttcaaaaatgcagtaaccaaaacattgacagtaatactctactatttgagagcctaagtgaaaggcaacaagtggggcgcagaaaagcacgaagctgcctatgagctactaagtggcctgagcaggttaggagctggcacgatgtgagggaaggcacatgccctcccactcaagtcacagaactgggtgggcgtggcccaaccatcagatattggtgatcctaggtactcccttgtctgccgcagtcaccctacccagctccgtcatgaacggccataccccctcacctggaaagcctgccttctccctggatctgccaacagcttctgcacaccctgcaccttgctcacactggttcctgtgcttctctggcccacttctttccttgaaatctggtgggctgcacaacctaactgttaagagcactgactctagaagaactagtttgcctatgctcaaatcctgtctcagccacttactagctgtataaacttgggcaggttccttaacctctctctgcctaagtttactcatctgggaaactaatcgcagttctgacctcacggagttactgatatgggctaaattagtttacacagaccactcagaacactgcctggcacaaaggcagggctgaattagtatcattaaggtccccacccctccttggagggtactttttccagaaagtcttccttaattccctctgtgagttaactgctccccagtggagcctggagctccagctgctgctaacacccctctgatggcatttatagcttatctttactcatgcctattttcatcattgttgcccacacgactctgaaggcagagtactaactatacccattcctgcagcatggaggcggagtccccagtccctttcctgagtacctggtacagtatatttgcaccatatactgggccattacatagttacctctcaacagtcctaagatactctaggactatcaccccaagtatacagatgaggaatgtgatgcttgatctctctaggataagcaacttacccaaagttacagactagtatgctgctattaaattctggtttgctgaaattaaagtaaactaggggccttcattcagaactgaaatggctttcagggctgaatcaagacaggtatcaattcatgtgaacacacagaaaaaggtctagaaggacatcctccaactagttatacctggtaccaggatgcacaggaggacagtgaagggcagggagttttgcttcacttcttattttatatacctctatattttagcaatttttaacaaaagaagtacttaggtattacttgaataattaaaaataaatggcttagtataaagaatcatgttaaacttacctcctacaaaagactttgaaaccattctgattgaattctaataaaactttagaagcgttcaatcttcctggaccgaaagcttggtaagaagtggctttggattcagacaaacctggcttccagtctcagtacttccccctcccatttacaactgagtgacactgttcatggcactaagcctctcagagcctccgaatccctcgtgctggaaagggaactgtgctattatttaccctgcgggttctcatggggatcacctgaagtagcatgcaaagatctgatacagtgccacgcataccagaggccagaagtagggctgcctctttcctttgctgctggagtctgagctggtttttaagggttaatcctagtctacctccataagccagttcttttccaaaatgatctacttgggcaaaagataggtgcgggggagaatgccaccaatcgctcttgcccataaacccccgccctgatactcaccttctgagaataccagccatcgttttggagtcaggcatgatccaggcaataaaagcagagacagaaaccttcttgcgaacaaggtccctgatgccccattgtctctgtagtccaatctgtgcctctcatgcaaggtttcagggacgtaaaaagcattcagacaaatgggtctccactactgagctcttacacagggaaaagcatctgaatctgtcaattaatatgtattaagtccctacagggcccactgctcaagcagtgttggaagaatgagtggagaaaggacgaggggcagagtcccagcactctggtgccagactagccagataaggcagcacggcaagctacatgaggtccttctctgatgtcccagagactggttacctgggccaaaggctgcctctgcggcgggtccccacctttgctaggagcaacactaggaagtaaaactcaaatcactcttaagcaatgtgctggcaattctgatggatttttgtttctaaagtgtgctctgtgtaccactggaccaacaactttacacataagaataccattgtgtttatgtgcacaaacatttagccataaggatgttcatcacattactatttacattatgagaaagctgaaaagaatcttaatgcaaaagaattcttaactggaaaactggaaacaagcaatagtaaggaactggtgaattatgccacatccaagaagcataacatatactcatttaaaaagatagaaaacctaggccgggcacagtggctcacacctgtaatcccaacactttgggagacccaggagggtggaacacttgaggtcaggagttcgagaccagcctggccaacatggtgaaaccctgtctctactaaaaatacaaaagttagccatggtggtgcgcacctgtagtcccagctactcaggaggctgaggcagaaaaatggcatgaacccgggaggcggagcttgcagtgagccaagatcacgccactgcactccagcagaacgagactccatctcaaaaaaaaaaaaaaaaaaaagaaaaccttaatgacatggagggacccatgggagcccttcacctaacatcaaaataggtgcttaatgaagaaaaacaggggctctcaaggacagagatgctatgctgcagccagggagaagggacttgttcgtggattgccaactggacccatagttccccacatttagggaaaaaaaaaaaatcagaaaccaactcacaactcattacctgcctgaagcatttctgaaaccattttaggattatttaaccagataaggtcttgcaataaacaggtgtgagaattactgtctttttttaaatccatctactccacttctgagatctgcaatgcaccctagtacactagaaactctgagaagccctacactaaagaagctgcttcactctttccactccccacaaagagctggctatagaccctttattgaaatgtgcctgaacatctcactgaagagctgggaaagctgatagactaaaaagcaccctggatatggcagggaggcctgggggcccccgtggctctcacttactagggaatcttcaggcaagtcgtctctctattctagacacaacttctccaactgggagctgactaaatcagaggtacctagatctgtgctctcttcaaaggtaaaacccttgggggcatgaggggaggtgtaaaggtgggaaacccagtgagcagaattcacagcaccacactcccctaaaacaagtagatggctccatttttgttttattatttgcacttccacgtaagacttcatttaaagaaaagctctttctgctaaaacgaaaaaaagtaagtcagaaaccactgaaacctatgtcctgtgtggtccttccaaactgcgaccgttgattttctttaaatctgcattgcacatgggaaaaagtcctcttgagtcggggggggggcccaagccaggctccctgggaaaggcgagggtttgaggtgaacttattcccgcagaggctccacgggattggggggacgggggtgggggggcacaaactgggaggcctgcctatgcaggaaggcagggagctagggtgaccattgctgggggagatgagagggactgtgcagctaggtggatggataaaaaggcatcttgaaaaccaaggtcaagaatatccacgtggaggctgacagcaagaaatcggctaatgtttgaagagttatgtgatcaaaaaaaaagagaaccactagttaggtgaccgtggcagacggtttctgtgtctccacgtgaaggaaagactggaggtgaagaagtcctgcagtcgtctgttcttgtggtctggctatacaagggcagatgcaaaattcaaggttcaacttgaatgagaacttcaaactcaacctccacctcaaacctggtgtacgaagacgctcagaacagaatcagatactcagactcaccaaccagtctgaggacgctcagaacagaatcagatactcagactcaccaaccagtctgagaacgtgaccctgtccctttggttgagatgggattcccaagattagtaccctcgacggtatcctgggcacaacattgctccatttttttttaccctgctgcctctctcgggatccccatgtcccatgaagctttgtgtgatatgaaaaaccatccttgcaacatcccaagagaaatcaaaatgtggagtagaactcaagatgcctggaagagaagttttcctcctctaagcttccttcaactgggagggttccatcatgtctccacaattagcttgtcccaaccctccgtcctcttcagggtcaccacctggcactccaatgcaagcaaaccttcttcagtcaatcaccatgcacctccctaagatcctccagggccttcctggaagctggtggctggctgtcaagcaggtacagggcttccaaatggaattcatttaccgtctgcatccaactttcacttatctggaaatccaaacgaccaggaaacaacatcactggccaacttccagcctggtctgtgactccgatgacaacaaactcaccttgcatggcgatgctattcgattgataatggctgactagaaggctgtgttctgaaaataattctgaacccgggttggcagaaaaagagttaccgtgatcaacttgcaatgtctgacacgagcaagggaggaatgccggagtatgtgccaagcatttaccatctgtcctgtgcaccatcactagccttcagattggatttttactctttgcttcatcatatactggacacgtgactttagaaagtcactaaagccacctgcgtttttatcaacaaaacggggtaataagccttgtctgtcactgccccaggactgctagagggtgccaatgagctcacatacaggagattgttctacaaagtgtccagtgcaggggattattatatgtaagggattacagttcttctccacaagagtggccctcaggcactacatgttcctgaagaggcttccaaatcaacaaagaatgagcatgcgtgtggtggctgtgagtggtggcagccctcagcatggctcagctcaattttagacttgggaacggttcccccgtcatacaagatcaagggatcccagtgtctttggtgttcttcctgatgttcttagcactgtgccgtaagcacacatggtcctgagacccaaatgctgtaataccccagggctcagtgattgaaaagacagggccaaccccctctccagtggcggctggatgggagaggagcaacaagactgctgccagaagaccacccaagggggggtatgctgaagggccacgagaaaggtctccaaacaccccaaagctacagacacttgttccactgcattattttcatagccatatcaggtcgccctgcaggcaaacactattctcagataggagctgcatgttctcacaagactaagttgctcagagttaagattaggtttagagcgcattaactccagcaccgaggaacactccattgtggactgagtagacactaccatgagctcaagcgcccaagtggaagaaagcgtgtgtggatgccatgtgtgcatgaacatgtcacaccttacatgatgacttgcttcagaaggctggctctggggaaggcttgggcgattttaagccttgtttgccaacacatagggagtgcctgctggggccttcctctactgtgacacgggcacaggaatgggagagagacacacccagtttggtgtttcagtgtgtctgcaatgatggtgcctctggatgcactctccacccccaagctaccgcctcttctaaagtgaggctaaaatcacccataggactgatgagaggaccatcagttaacaatcatcaatatcgagagagaagacacaataataaaaatgacaactgcgtacagggactgtgcatgtgccggtgctgcactgggcaccgtgcccacgttttatctaatcctgccaaagctgacaggctcctggcctcaaaaacgaagacagtcgggcaggggtgggggagtggctaccttaagattaaacacctttctaccctgcaaccaccacctggtacaggaaccgagggaagggcctcccacaacatgaggcactctctgagcacatctcatacagccaactccacccgagaacctcatcctttcacggacatgggttatactcactttacagataaggaaactgagttggaagggactcaccaactctcccaaaccactagttaatgagtatctccaacaaccagacctgggttcctgtcaggcaaggcaggctaggcatgtgcctggtctcccgagcctgactctaaaggtttccagactgagtcccacatgccgtgtaagccctgacaaattacttcccttctctgtggctcagttctccaactgcaaaatggggtaatacctgccttgcagggttggtctggaggattaaactacctcatgttgaaagcactgagaacaggggctggcacagactgagagcccaataaatgtcaggcactatcagtgttcactggccataatcctccaagacaaagatctgcacctgcctggaatgccccttcccctccactttctttctcactccttgaggcccagcagcaacaccccctccaggaagccttcccagcccctaaagcagccagcgactcccctctctgggctcccttcaaactctgcctgtgttccccatgagcactgaccaccacctaccttgtcaattagtctgtctgccgttccagacaacaatcaacacaatcctggctcaagtctgcatccccctagtgccatacctgtggcaggatctaggctacactcaataaatggtgaccacgtgactggaaacccacccactgcaggtttccgacgctcttccacccacaatcctttcctgagggctcaggagcatcaggcatggggctgagcactgcacacctgtattgctagtgtatacctgtaccctgtcccctcttttatgaatggataaactgaggccccaggggccaggcaattaacccagggccacacagctggagaacggtagggccaggacaagggcaaagcctccctgactccagcagaccctatgcctagtcctcctctttttctacaatcttcttccttttctattcttttgttgggaggcagggggagatgtttttgtaaaaaatgcaatgtctttatataatttccccatggctgggaatgatgaagagcaaaccaacgggctgtgcacgcgtgactctgtgtgcctgggccctcttcctggtgtcacccgcataacctcctggcacagacactcagctgccacctgacagcattgcttcaccttcttccctcttcccctccagggcccccagaaccaacaggggaagttggttgctaatggcaacagtcttgggagcaaggtgagacctaccagcccaccactgacggctgaagggaaattttcaacagcctctggggcccctttctgtcaatcaagcggcctcttccctgtctgggactcggtttcctcttctataaaaagcgagtgccacccttcatgattctagttacagagttgagaagggttacacgaatccagccaatctgggcctctggggctgccctggatggatttagaagggtcagcaaagagttgttttgaaaaaaacagcaacaggctgggcgcagtggctcacatctgtaaccccaacattttgggaagctgaggcgggtggattgcttgagaccaggagttcaagaccagactagacaacatggtgaaaccccatctctataaaaaaaaatacaaaaattagccatatgtggcggcgcatgcctgtagtcccagctacttgggaggctgatgggggaggattgcttgagcccgggaggtggaagctgcagggagccgagattgcaccactgcactccagcctgggtgacagagtaagaccctgtttcaagaaaaaaaaaaaaaaaaacaggaatgcctctcggcacaccagctcagaattgcccccaactccctactcacacccaggggctgcttgaggaaagtgtctgagctgagtgccctgggctgaccgtgggagacatgagttgtttcccatggtgtgcacgtctggaccaccagagctgcggtcagtgtgaagttcatcccgttatccccactagactctttcctgctggacaggaaaggcaggttattacagaggcttctccagagccgtgcacaaggacatcatgggaagaggtgactaaagggctcaaagagcccaatgggcactggctggaagcctgtctttgagaatggcaaagtagcccagggcagctttcttaggagaagttagggcttacactgagccttggaaggcaggctgggcaggtaagacgcaggtgcgcgggaatgtgtgcggaggcaggtggccggcagcccacggcgtgttggggatccagagactgggtagccaggaggcctgcagcctgcagccctggttcctgccgctactcacaaggagcacaggctccgggaagacgactctgagcaaacatcccaggtcatcccacaccacctttgtcattaatctcttcagtaagccccaaaagggcatcacactttcttgaggccctgctggccctgctccttcccatctaaaagttcttgacctgtccaagcctttccaggagaactgacaccaaacacctcacattctccaggatgaaatttgttcacaaaccaccctcaactatcctataatggatgcttacattatccccatttcacagaagccaaggtgaagaagcaagtcaatcagtgaagcctgttcaggtggaacaagctgtccccatccctttctccctccatcccccaccccacctggcaggggacagaatgcaaagcaaatccatgctaaccacacacaaccctgaccccaagaacccagacagagtgtaaaatgcagaccccacctaatccaacgtgagatatcagggctatcaacgtgagctaactgacttccagagcatgaacttgcttaaaaacattctttagttttcatttcatgaaaaggtcatacagccgaagcacaagcaccactcaggtgggcaggaggccaggggccagagagggggaggggacgagagcatcccgtgggaagatgcacaacaccccaccccgtcactgtgggagtcttggctcccaatctgtaaccttatcctggggcaagccaaaaaaggcagtagaggaggctgggccaggatatgcccctggccctgcacatgctacccgtcttctccactagctgtccacagggcctgcttctgtctctgtgtccccaggtgttgggcaggaccccgtggtcagagcctggagggctccgcagcacaacagccatcatcagacagcctgacagtgctgaaaagtcaccaccatgggactgacagggaaactaaggatcagatagaaaagcccacacgtggatgacaaaccacctaggggaatttattcattcctacttgggggggatcacactgcatgcatgcatgcatgcatgcattcaatttatttatttagcaaagatgtgtggtggaccagccagactggggtctgccagaggactctgctctgagctctttcccacaggccagtccacaggcacctccacctcatccacattctgaggcctgcttgaagctgctacagtatactcctgctgccagccactttcacaccagcagctgactgtgactccagtgcttcttcaagagtgtcaagttgtgggcccaggagacaggatccagaaaaaccattcatgagaggcgcccccagccagtccccctccagaagcctccagtcgcctggtggaaaggatggtgaggggcgagcacctcagagttcacatagaagccatctatgtaaagtaacagcctttaaagggtgacccacagccagagccttcctctggactggactttatcttgacgctacaggcggctgcggtggccctgcctgccacagggccctggcggtggcaaaccctgcctgcagggaagcaaaggcaaggccagcccagtgccatccgctgcccaggggggccacaaggtggtgctgaccaggctctgggaggaaagggaggggaaggaggagagcagggaagaggaaggagagggataagtaggagaggtagagggatacagggcagggagggagggggaggaaagagcctttgtgctggcttcccccactccacagtacccaggagcaacaatcagttatgcaaacagggacccctcccccaagcccagccatccactcctggaccccctcctcctcccttagtctctggtctcccctccaccctgttcactcgtgtgcgtgcatgcgtgggtgtgtgtgtgtgtgtgtttgtctcacacacctctaagaggtatagtggccctgaggccttgcccattcaggaaaaaacctgcccccaccctacccctttcctcaagttctttagtccacacaattccacttttaggcatgttaccactgccaacactgccagcctctaaacccactacccatttcttgctttggccaccagcaatggtgagtcaaggaatggtgctcccaacctgaagacgcagcccttacagctccaccaagtaacaagacacgctgcctgctctgacttcattttgctaattctctcaatgaaatgcaataatgtgaaggaaaaactcgtctttggggcagggccttcaacatatggtcagcctggactccttcaaaccacacagattaaaatctcagccaggtgacaacttctaggaggggggctttcaccctccttttcttcttcatgagatagacttttgattgtttcagtttcaaattacatcaaacatctaaattgggaatcccagctcctccaccaccagcgcatcaaaggtagatattcaaagcagtacttatttacaaacggcgatgcaaatctgtcccgacaacctgggcacccttgacagacacttctgccactgcccatcccaggagtttctgtcccaactgaggcctaggggtgtggctaccatctgtcaccctgtgaccaagtcatgaccatgacaatgatgactcacacacaaagagcctggcccctctgttacaagtccaggtaagtttttaccagctttgaaataaaaagcattaaatgacaaagcttttctacagaatgagagagaggtaaggccctctctcacctccaggacacacagtcctcagtcaagggcatttaaaacattccactccggaaatgccagagggctggcaaagacactacggttaaaggcaagcaatcaataaatggggtgagggtgccacaggcctcatcgccattactgaaagcatacccctttcccctggaatggtttccccactccaaaacccaaaactgaaacccacggtgctcctccctttccccacaaggtctgcctccaggccctgcctgataagccctcaaggttactccgtaaacccgaagggcaggagtgctccaacagcccaacctcagtgtgctgagtgctgagtgtatacaggccactgggcacacacactgaatcctgagaagtgagctctaggcattgttgtctgcttcttctagatgaggatactgaggttgcagaaaagagcagggtcacacaggtggcttgaggtaggacgccagcagccaggctcttaacactcaggaagggtggtgcctccctacccatccccccagcatcatagcagggatctcagatctgctggagcatttccagcgacagacacctataagacacatttttacaaagccactgtttaaatgttctaatggattcctgtggcttgggacaaaattcccagaggaagcatcatacacaaagctgaaaaataatatatgtcaaacaacttggagtgttggtgatacgtcctagaaaggtgggttagaagataaaaactggctttgatgacagcatttaagacactgataacaaaaacgcatatgaagacctagaataaaatatatcatgtaaatttagggtggaacatagtatctctaaatttacatgttatctgctatattattttaaacatgtatgggtaaataaattagatattttaagtaaggaaaaatacttccagcaataatgaagccgtgccgattcaccacaattctgctcggcctcaacacagcacaaatccacaccaagtctacggaacctctacaggccccggtcccctgcactctcctgacgtgcaggccacacaaccccaaaaagcagatgccctcggacctctggccatcagcttagaaacaaggtgccagagttcccatttttataacaaatgaactgaatccagcccaactttcccatattctcatcaactttctttcatggatagattttccccaacttacagtttttccttctgatttttgtttaaccccctagttatcgctaatccttgcttaaagaggattaagacaatcatgtaacaaatatgggtgcttcgctacccagaggtgtgggtggggctctgttacagtttgcgcgtccatatttctgggccactgcacaaagaactccaaaccactcagagcaggacaaagaggggctgtggtggagaacccagggccctttaccagggaaaggggtgtaaggccaggtctcctggcctcagccacagcccccaatccctctggctggggcagcaacaccccctccaaagctgctccctcggaagggactgccaacagtcaacgccaaacttcaaaattaactgccaccattgggggctgggacggcggtttggttccttttagtccaaggcgctgacagccaggcctgcccctactagctccttctgttgtttcgaggggagtgaggcccggggctgagttaagtttcactggtgagtggccggcgggcacaaaggaaggaaccgctgggggaggggaggccgcagagctggagggctgggacaaaggggacaagagacaaagggacaggaaaagagagcccgctttatcctcctccgaggaaggaactccccatttagtcaaatatttcactcacacagctctgggcaagaaatgccccaccgaacattttccgaggtggcttcaggtgtctcccacaccctccccacccaggccagacacaagacgctggctctcctggccccgccaccgcctggccaggtccccgccccaacccacttgttcatagtcagccaggttgcttttgatggcttcctccctccagccccgatctgccaccctgaagagagacaaagaattatttatttggagaaaagaaaaaccctcaaagtgtcagccagtaacagacatgacacttgctacgcaggagcgacatgcgggttttctagtctgcaggagggccttcgccagcagcacacctcggccaccctgggtgccctcagatgctgtgaagccctacctgtgtggcctttttctgttttctctttccttaaaaccactgcataccacacctggaggttgtgagaattaacctgtaatgaaggtgagtggccagcaccaggacggggacgtctgcaataaacatggcaaaatctgaaaagcaggtgaggtcgaccaggctcccaggctcccaggctgagacaacagaaccctcagggctgtcttcactgagacgcttgatttgttttgttttgattttggttggaatttgatttgagggagacatgatcccaccacattttacatgaacaaagcaaatctgacatccacgcccaggaccaagccaagaaagaggcggtacaatggtgcggccaggaggctggctggctgtcaccatcggcagggacagtaggagaaagccaagagccacagtgacccttccacagaccacagtcctccctactgccacccactccttgcccgagccaaagtcctgctttctctggacatcactccattcgcccaaatacctaggcccctaccatgtgccaggcaaagcacaaggcggtatcgtccctgcccttcctgcaagaacacggcgcatcaagtccttcccacccgccgttctaaaacacgaggctttcactctgtgcctcacactgggagcgcactcattttttggggctgggaaaggggcactcctggtctcacagtggggacaatggggctggaggagggcctctgttagcggaaagagcctgtacacccaggggtgagagggctctctggtcagagaggaaaatggaatgtggccaatctcgccagggaaaggctgctccaggctcctccctctcctagggtctgggctgggcgcccaagttggtggcggcctcggctcccacaccaggtcatgggcagaccctccccgcagagcagcggacgccactgttccagggggattgactcgctctgtggtctggacaggctaagtcacacaccccctcctttttccttcccctccccatggttcctcctcacccccatgcccaaatgcttgagtcttgattacaccctggacagtaccccagcacctgacctgccaaataattagacccagaagcaggccacaatcggctttggatcagaaccagtgtctctgctgcgtgcagtgacagcttctgtcctcgtggaaagaacgccgtgccgacacatgctccgagttaaaaacattttcaaaaagaaaacgggagggggaaagaagccatctgtatctcaagtctgcaagacagctctggccagggccagcttcggcttcctgagaagctacggcccatcgtggtcccagcccaggaccccggctctcacctacggaggggtattccagacaaactcgctgactcaccggaaaaggtggcattgtggctgacacctgtgcctcagaggtgaccacagcctggttgtaatgccccacccccaaccatggggttgggggtgttggtaaagcctagaagaattaagtcaagtctgacagagtgtgggcacctgaaagcttccttaaagccagtatattaggcagggcatgatggctcacacctgtaatcctagcactttgggaggctgaagcgggacaactgcttaaggccggaagtttgagaccagccgggaaaaacacagcaagaccccctctacaaaaaaaaaaaatctgacaattagctgggcatggtggtacaagcctgtaattccagctactcagaggctgaagcaggaggagtttgaggctgcactccagcctgggtgacaaggtaagaccccaatacttttaaaaaagagagagaggctggaagtggtgactcacgcctgtaatcccagcactctgggaggccgaggctggtggatcatgaggtcaggtgaggaagaccatcctggccaacatggtgaaattccgtctctactaaaaatacaaaaattagccgggcgtggtggcgtgcgcctgcagtcccagctactcaggaggctgaggcaagacaatcacttaaactcgggaggcagaggttgcagtgagctgatatcgtgacactgtactccagcctgggcgacagagtgatacaccatctcaaaaaaaaaaaaaaaaaaaaaaaaagagagagagagcatgtcagtagagtcttcattcttttagtttatgtccttgtagatttgtgtttccaataaccaatttttaacacatttttgctagaataacagccttataaggacatttttgtttcagctacatctccagtttgtgctctcaccaaggtgatcaccactttctccaaactctcacccccacctcggtggggcaccttgccgaggccctcaaatgacttggctcaaccaagtccacacccacccacgctgggaccacaaaggtatcatttaccaccactttacagaggaggaagcaaaactcaggtgagtccaagcaacaagtccaaaaatgacagagctggccagcgcagtgagacagggtgctggggcaagcccagggaagggtgaccccacaatcccctgaggggatgctgggaagcattcctgtgccttcctaggggacaagtcagctggaaccaacaggatatatcttatattttaagatgtgcagttaggctgggcatggtggctcatgcctgcaatccaagcactttgggaggccgaggtgggtggatcatctgaagtcaggagttcgagatcagcctggccaacatggtgaaaccccatcgctactaaaaatacaaaaattagctgagcatggtggcaggcacctgtaatcccagcttctctggaggcttaggaaggaaaattgcttgaacccaggaggcagaggctgcagtgagccgagactgtgccactgcactccagcctgggcaatagagcgagactctgtctcaaaaaataaataagtaaaaaatacagatgtgcagtaagcattttatttttatttcttattttttacagacagggtctcactatgttgcccaggctggtcttgaactcctaggctcaagcgatcctcccaccttggcctcccaaagtgctagaattacagatgttacccactgcacccagccagttagcattttgaaaacacataaccccagataaaggggaggaaaatagtctatgaggtctgtgagggcaaaagatttgctggtgtctttgcttccgtagccaaacggcagaggcatcaaatatttgatgaatggaagactagacagattagatgaatatctgataaagacaaatatctttgatgacctatgggtggatttttggataaaatatcttcctaaactgatactattaggacaattttagcagaaagtagttgtttaaaggcagtaagcatttcaggcccttggaaaagcctggatggcaggcttagaaataaagaagtcccagccaggcacagtggctcatgcctataatcccagcactttaggagactgaggcaggtggatcacctgaagtcgggagttcgagaccagcctgaccaacttggagaaaccccttatctactaaaaatacaaaattagctgggcatggtggcgcctgcctgcaatcccagctacccaggaggctaaggcaggagaatcacttgaacccaggaggcggaggctgcggtgagccgagatcgtgccattgcactccagcctgggcaacaagagcgaaactccatgacaaaaaaaaaaaaaaaagaagagagagagagaaagaaagaaagaaaagaaagaaagaaagagaaggaaggaaggaaagaaagaaaagaaagaaaagaaagaagccccagctgggcacagtggctcatgcctgtaatcccagcactttgggaggccgaggtgggcggattgtctgagctcaggagtttgagaccggcctgggcaacacagtaaaaccccatctctattagaatacaaaaaaaaaattagccgggcgtggtggcgtgagcctgtagtcccagctactcgggaggctgaggcaggagaatttcttgaacccggcaggcggaggttgtagtgagccaagatcgcaccactgcactccagcctgggtgacagagcgagactccgtctctaaaaggaaaaaaaaaaagaaagaaaaaagaaataaagaagtccctgtactacagtgtggctagaccctccctgaagaacagataagagccattcacaattagaagcaaccctgcacacagagaccacagctccaagccctaagccacccacactggaatcttgtttatccttggctaagcaaacacaagtcttcttagataatgcaaaggtcaactgtagacttgtatgacctgataaaatcgccaccaaccctgaattacagggtgttcaataataaaatatttctacagagctatgagggagagagagaaatcagaagtgggctattttccatcatcctccattaacaccccactaagacacaggctgagtgatggagttctggattccaggatcacatccctgtccacccactccccagccccctttataaaaagcaagaaccggccgggcacggtggctcacgcctgtaatcccagcactttgggaggccgaggcgggcggatcacgaggtcaggagatcgagaccatcccagctaacacagcaaaaccccatctctactaaaagtacaaaaaattagccgggcatggtggcaggcgcctgtagtcccagctacttgggaggctgaggcaggagaatggcatgaacccaggaggcggagcttgcagtgagcagagatcgtgccactgcactccagcctgggcaacagtgcaagactccatctcaaaaaaaaaaaaaaaaaaaagcaagaactgggcaggagaacagtcacggggcttctagcccgagaggcctcagaagttgtcaaaaggctgggttaactgaacagagagcattttcccacacacctctgaggacacttcacatctgaagctccatcgatgtgtcaaagacctacttcagaaaagaaaggcaaacaccaaggccagggctcgaactgagcagacgaacttggacttgttctaagggcgttaagacttcagggaaccattcaaatgcacagactgcacagaggggccctgggaggtgggcagcctcctgatcctccctgatcactctttcagccaacaaatgttgagtggggatccaccaagcgtcagggcctcagtttacaagacccaccatgggctctgcccccagaggctcaaagattattagaagcatcttagaattatgtgatgtctaaactgagacatgaaaaataaacagggttccctgagaggagaaagaatggcagcaagtgctccaagctgggagaacagcctgtgcaaaggccccaaggcagagagctggcccttctctaactacagcccaggaatctcaggcttcacattccaccctaacagaaaaatacacagatgtctttttaatgttaggtccccaaataatttttatttcaaaacacagaaatattccgttaagtccctctaaattttttttttccaacatacaaggcccatcaccttctcacctctccccattgaccacctttccatttctgcagcagttttccaagagcagtagcttctaattcctgaacagctcacatgggcctccagttgtcgacacaccctgtctcctctctggctaatggtggccccagctgcctgtccacgtctccagagtaggcctgggcagggacagggaaggacatacttcctaaccaaaagaaaagagcaaaccgcaggccaggaaggaagtaggaagtcatcctgagcgcagatccctagatgaggcctgagcacagcccctgatggcaggcagtgggcagtccctccccagatggactagggaagctggcacttaggaagagaaagatcgtttggggacagggagcaggatgaaacacatccctggcccttctcaaggacatggcttgtgctggggacatataaacactcctaacctaaaagcatttggctcccttagctgtctttgtcctcacccctgctccccaccaaaaacagacttcaggaagaaaatgaatcaagttttacaagcttccctatttacccagggctacaaatctatcagtggggaagcttttaaaatgttctctctcctagcactgtcccttcccttctatctaccactgcccccaaccccaaacacacacacacacaacctcttatgggtttctttaaccttggctatggatcctgagtctgaaggaggaattccaaattcagaacataccccagtccaccattcataaatacttcctgcttttcattccactcctcttacttattcgtgcttctaaacgtgccccagaatcactccctaagcacagataccttcctttcagcctctcattctttcattcctgaaatatcttctaacatgctctgcttcattatctcaaagcagtactgcaggctgagtacaatccccattttacagataaggacactgaggctcagaggttaatcaactggcacaggttacactgtggatgggggcgctcttgtggggattagaacccaggctgcttaaccttcaaaagctctcgttctctgcaccttggttccccagtaccccatattcatcagacacaaaaagtaaagtcgcttcctttttcaaagaaaaatgacccattctggatcacccacagctttaaatattgcatgttgaaagctaaaggccattttaactgatgcttcaaaaagtatcatggaagactcagcccacaagaaaaccatccagaaagtagagactgtgttaacatgcagtgtggggttcagtgcagttctagaggcacagatgtttagggtggctctccctcaagacagggatgctgctgtccagtgggcagtcaggggcctagggttacagcttcaacccctcgctccccacagaaggaggggtttcctttgtgcaaggaaaagcaagggctgggtggccttcctgcagtggcccatgagcctattcttaggattgacatccttcagatacattttatccttcagataaaatgccccacgggcacagcaccttatggagcggtccacatcatcaactcccaggagctggggaggatggggagatgggatggtccctctggccaatgaggggatccacactgtactggggcccttggctggaagcagctcaggtgttctcacccccagttccaaggttgctcatatcccgtattccagtgtcagcaggggaagcaacgacacagcatccgccagaaaaacaaagtgggaagaaggatttgccccatcttcaaacccatctaccctaattgtgctaaattctctggctagcttcaatccacaatgtataaactgatcctactttttttttttttttttttttaagagatggagtttcactatgttgtcacaggcatgatcatagctcactgcagcctccaactcctgggctcaagcaatcctcctgcctctacctcctgagtagctggactataggcgcacaccacctcacccagttgaactggctctactttccgatcccatcttcctcccaagcaagaggcctctctcctgtcatccccagctacttactactcaacaggagtcccctccttcttgcctgtcagcacccaccccgagtacattctccccctgaccctccacaccggggcacctcattccctgctctcagctttcctcaggcagtcagcaaaacttttattccatgaagtaagaacatccgttccatccgtctgtcttcctgggatgccagtgtatgagaagacacttcatacaacactgggtatgattactcacacgtgctagtgtcccaaagcgcccactgggcttccttcgcaggggattcctccctggatcgtttactattgcttatagtttccagggcactggccagaaaaaagcctgaagttgagagaatcggggagacccttaaaaagaactcaatgattcgactgcttaaagctgaaatccaacctctccttgacagcaaaaacgaagctgccaaaaaccaagccatgcctcttcaagaaaggaaggatttccaactaaccctttcaactaaatccaacgtgggctctttgctgaaatccctcctactctacagaagggccttctcggattatttttcttcaaaaaaacatcatttacacattgagtgtctttactttccaaaccattcagaattagggaaagaggggaaaaacacgtctgtttctatttgaaactgtcaaaattagcattcagtaattaaaaatcacaccctttctcttaataacctaaccagcatgatacaatcaggttgtgccaactctttaatctaattgactaattacagattttaatttagtcagttaccgaacaactgttgacaatttgttttcattagggacagaacagaataaatatttaggcttccagtcacaaagactcctgcgatcggctctccaccatgaccccaacttcagagtgagcttcagctctatcaatatcctcagacacaggtacccttgctgcactcgagtcgcttcttagcaaggccccgagccagaacaagccttcccaaaagtccctcttaaggcaaaagccttacatacaagcaacggcctccattcccaaagtacaggcaattcccaaattcacacacgtcactcaagaagtggcaaacacttaaatgttgtgaagaaaaataaattcaacactacatgtcactggcttttaagcaacaaaataagttaacagtcaaaataggtttatctgcattcatctcaccgagaagcaaactgtcactgacatttttttttaagacacacgtttacaggtttctactgaaatgatccaattctttcaaagtgcatttttccccaaggtccccatctcccaaagtcatccaaaagtttgtcaaagtagcagcatggctcaaaggtagagtggggctctgggttcaaatcccagctctactatctaatgacttcataacaacgggctcatgccttcacttctctgagccctggcttcctcatcggagaaatgaggtcataacagcccctatcttatagagtgttaccgggattaaatgccatgcccacacacagtgcctggcctggggtaaatgcagtaaatggtggtcactgctgtttcagaaactgctgttgtatccctcactgtccccatgctacaaattaggaaagaaagaaatcatctgtcaaaggttaccaagctattaagtgggaaagcttggtggagaaggatgatttccggactcgctgtccagtgatccatctgctgcaggtaatgccagctcagaaccgcagggaatatgggacccctgccttgggatatatctgtaaggagaggaggctctgcagatgggagctgttcacacaggctcttacaccctcagtgtgtctaccctccaagctgcactgccctaacagagaagccttgcatgcacagccaggagagcaggggtggatgggcctaaagagagctcagccatctccggagagaactctgcattctaaccttcctcagtcctgggggaaacacgagggatgtccctctacagaggtcaaccctggccatgccaggacaaagtgagaaggcaccactgctaggtgggtcctgcctaaggattctaaccaggtttctggaaaacttcactgggggctcttgaggcattgctaatattgtttaagttctagaagaatcgggtctgcctcaattgaaatggaactgaaatttccaatgtttttctgttgactagaattctgttctaccaacctggtgtgctcacgttggttcccctgagctgatgagaaagtctcatcagcagctatatagttctcattttccacatttcttcattaaaattaatggtgactcaatgcatgcaatctctttgtaaataaaatattttcaagcctggagtccacagggggtggtaggagatttaataaaagggagccttttgagtgaagagatagcaaaccttttctttaagtcacataggtcccaaagccaagatgttttcttcctggacgaggtcattaaaaaccagcccaatccctctacccacagagaagcaccgcaccagtcaggaaccctatgagcccaggccaggcttcagctggctcatctccgtcaggacccacctggtcctgccagcctcagcatcaaaccactccaggctgggcagggggtcatcaattaatgagacagaaaagatgccaaatctgggccaggcacagtggcttacacctgtaatcccagcactttgggaggccgaggcaggagactgcttgaggccaggagtttgagaccagcctgggcaacatggcaaaccctgtctctaccaaaaaaaaataaaaaaataaaaaaacagaaaagttagctgggcatggtggcacatgcctgtagtcccagttacttgggaaggctgagccaggagaatcacctgagcctggggaagctgaggctgcagtgagccgagatcatgctactgcactccagcctgggcaacacagcaagaccctgtctcaaaaaaaaaaattttttttttttaaattaagaagacaaacctattaagtctaccttgcccatgactgaatccctctaagtgcctcatttccttctctacaaaataggaataacagaacttaactcacagggctgttttgagtatgacaatagacaaaacctaaagcacttacaacagtgcctggcatacggttagcactcaataattgtttgctattgttatcagttcttccgtcacgaaatgggaggaatgcctgtcccctacattgtccaacagggagatacctaagaatgccttttaagggtctgaacacatagtaagtgctcaataagcactggtttgctttgttaaatagaaaactcattattactaagccataatgctgtcgtttagaaatttatccctcaccaagaactcaccaccccaactcccaatggtcaacctcccatgaagactgtcactctctaaaatcccagggacccgcggcaaacatcctgatttcctcctagtctcttctcttccagctctctctgaagaagacgctgccagcaaaataacaccaaagaaagtatgtggcgacagtcaactagatttaagttcattttctgtagcttggggtcagaatcgactgaagcactctgatgatcaagttttctgcaattccctattccacgcattagctcgctgacagaaattcactgcggtatttaaagtggcagccatcacaactaactcaaattgtattggcttccccgatgctgaaatgctctgctgaaaccatcaattggccaattcggagataacgtggtggctgaaattccctgtcatgctgtaaaatccccttttgaagcggctcaccagcgcggagatcgtggagagccctgcccggagctgcgggccagggccgccgcccgtaacacaagcgggctccgagtgggatctggccggcaggcgggcagcgctgccaagaggaagagcctccagagagaggagaacattttctactggaagccgtctaaaagccggcgagcagagaccggcagtgcgcacacgcccggcaccaggcctgcccactgggccatctgccccctcagcaccggctggatggccaaaggccacaggaagctctcagcctctcccaaagaaagctgcaaaattcctaaaggatggcacagacacagacacgggcgccagcctcttaggtggaggttttctcaagtcagtggtggccccaggcttgctgtgtcaccagcctcagtgtccccatctggaaactgagtgtctccttcttcttgcacatctgaaacagccttctcaaaggggaccacaactcacaaagcattttcacgtgctctcacccaacttccaaaaagctggaggggcagaaaaaagccggccactgtttcctatcattttgcagacaccagacaacttacccaaggccatctgaaagaatcagatcttgtaccttggtcatccaagtccaaatcccatgtacagcccacaacactgcatctaatggcaaagcccggcaggcagcgggcaataactgcccaccaaccatctgccatttccatccggtctataaagctacgctctgcccctctcagagctcaaagcgctgcagcagtatcccagaatgtgggagaggcctgctcccccctctccactgcctcctctctcaaacagccttttgtgactgggaaagaaggatcagaggaaaacctcaggcagcggccccagggagcagttgtgcttcttaaggtcagaggactgtgaaacagaagtgaaatgtcaggcgcttcacccaaacacacaaagagcaggggacacaaaacctgccctggaagctgtgcaaacagctgtcaccaggaggggacagggaatttgggaggctgggtcaacctcggtcagacaggatgccttacgacctattctcactactgccactgcctaagccctgttcagacgcaagctccacggggggcaaggaaccccctccacccacccacctcaatcacagacaggcagaaggagctgccccacagccagccagcagggacaggctgcaaactcctccagctttgcctagagagccacatggactccgctattaagaagagtgtccctgcgctctcaggccctctcctcccgcgcccactccagagtggtccaggccacagtcccaccccctccaatgggagctgttacttactctgccttcaacaagcatctgttgggattttctgtgtgttcaatgcactaagactatggcagcaaaccacagagacaacggtaccaagtgcccgccaggcaccactctgaaagcacaacatgtggtggggaaacaatttcccgagaactctctaaggtatggatcatttccttctagtacagatctggaaactgaggctcagcaattgcttgtctcttgacccaagtcacttaacttgtaggaactaagattcagtctcagctgtctctgggctagtggccttctgactttgcgttgagcccccaaaaaaggcaaatactacaacacaaacccagggcacacatacttttatatgcacacataaatcactgaaaacagacatttccagaaacaatatttgtgtttactctgtgtaatacggttgtttcttttttggtaattaccagtcatgacccactaagttggtttcatgatgtattaatgggtcacagctcacagtttacaaacagtgcttcaccacgtgccccttgtccatcttcattaaaacgagtacttagcacagttgatgcctgggcaggaatcaaatccttctcacttctcaaggctcagagccttgctcacagaccccagaatgcattcaagacctgcaataggccccaggaatggggtggcagaaagggcaagtaaagttcctcccctcaaggagctttcattccagaaaggggaaggaagagacacaaccttaactgaaataactctccttccaggcagctggtaacaaacgactaggagagttacagagttagttcctggggaaaaaacagaagagggatgtcttcccataggagtcgtcctggcaggcctggtggaggcagccacattccaggctagcattggctctacagaagaataattggcaggggaggaaaaaaccctctcaggtggtatggtaccaagcgggaatcatggtgaagaggccaaagtggctggagaaagcacctgttccagattcctagaaaatgagaagtcactaggagagaagaaaatggacagtgatggggcaacttcaggccaggcacaggccagaagcatctgtgcgtccactgttttctcatcctcacaagcaccagggctggtttggaagcggcatatgtgacttgctcctccaatcactggggcagggagaacataatgtgacttgcccccacaatcccccaggggtacctgaaacccagggatccagagagctgatcaacagggaagctagcccatgatggttcacgcttcacaggcacacacctctcaccccaacgtcattctgctggccccttattatcaatcactgagaacactgcccatcaggaagccagaactcagaccaggccggaggtgaggtaagaaaaatgacagcacaggccgggtgtagtggctcacacctataatcccagcactttgagaggccctgacagtagaatcctttgaagccagaaattcaagaccagcctaggcaacaaagcaagaccacgtctctacaaaacattaaaaataaaattaaaaaagaaaaatgacagcacacatttatgcagaacttgcactgtgctaggcactattatatattgtgtgtatatgtgtaaacttaatctttatgaccttataaaggcatactttatttttttatttttttgagactgagtctcgctctattgcctaggctggagtgcagtgatgcaaccttggctcactgcaacctccacctcccgggttcaaactattctcctgcctcagcctccagagtagctgggactacaggcgcccaccaccacgtctggctaatttttctattcttagtaaagacagagtttcatcatgttggccaggctggtttctaattcctgacctcaagtgattcgcctgcctcggcctcccaaagtgttgggattacaggagttagccactgcgcccggcctggtatactttattaaccccattttccacccgaggaagttgaggctcagaggttacttaaggtgtccatgtttgcacagctcgtaactgcaacaaggcaaaggaaagaaagcatcctggactattgattaggcttgcaggcaggtttgagttctactggaaacttcacgcagggcacctttccctctgcgcatgtttctttagctacttgaaagaacactaggtgacctccagttccatcacctgcaatcctgctatttatatctatgataaatatatatttcgttacaacacaggggtgggactgtttacctccccccactgcccccccaactccatactgactgtatcttggtctcttagaaaaacaagatcattccacacaattctttttaagcccacatctcatcctggactgcatctgtctcttcaactagacagtaagcatagtaggagcttggtaacctcaaaatacggtagtgtcttattctcctggtctgggggccgactgatcaaggcctcagggtcaccccaggaagtcaaaagaaaaagaagccaatgtggccagaaccagcttcccatggacctgccatggctgacacttcccttctcaagctcactgtctccttaagactcctttttttttttttttttttttttttgagacggagtctggctctgtcccccatgctggagtgcaatggcgccatctcggctcactgcaacctccgcctcctgggttcacaccattctcctgcctcagcctcccaagtagctgggactacaggcgcctgccactatgcccagctattttttttgtatttttaatagagatggggtttcaccatgttagccaggatggtctcgatctcctgaactcgtgatccgccagcctcggcctcccaaagtgctgggattacaggcgtgagccaccgcgcccggctaagactcctttttttttttttattgtatgtgggaatcgcctttgtgggatttccacatacaataaaaggggattcccttatacaataaaaaaaaatcaggcacagtctgagcacctgccagggcaggatacataccaaagagaacagtgcaagactcctcatttcatccctgttaacaatgacacaggatttcacagcacaaccaactttccctggacagctttccatgcctctctcaaggccgtccccatggtgggctgtgccaggacaacccttgagcctattttacagtaaagagatggaccttgagaaatgaaggccccccacagctaacaaggacatgaagctgaaatgcaaatctagattcctactgatgccaagctgcatgccctctgggccttaccatttagccatgcagtggccatatgcaggagtgggacaggaccattctgcccaatacagataaggtgcacagacatctcagagacgccatttatcagtaccagtctgtgacaggactgccagctctgccccttgagggggtgcaggggtgagacatgacagcagggacgggcggtgggggggtttagaatcaatcctccctggatattgacggatgactgtactatattacttaaccctcacaaccactatgcaaaggaatcagcattcccccattctacagatgggaaaactgaggctcccggccaggaaatgaggatccctgacgatttccagccaagaaatgacaaagtggagactagaattcacatgggagtccaagccaccagtcacaacccaaatcctttaaaatccagaggattcaaaacccagggaaagaaatacacaacacagacacaaacactgctaaaactcaccttgccaaggctacaaaaaaccccgttaccggccaggcgcggtggctcacgcctgcaatcccagcactttgggaggctgaggcagtcagatcacaatgtcaggagttcgagaccagcctggccaagatggcgaaaccctgtctctactaaaaatacaaaaaattagctgggtgtggtggcacgcgcctgtaatcccagctactcaggaggctgaggcaggagaatcacttgaacccgggaggcggaggctgcagtgagccaagatcgcgccatggcactccagcctgggtgacagagtgagactccatctcagaaaaaaaaaaaaaaaaaaaaaaaaaacaaccccattaccccagcgaatcaaaaacaaacagtcatgattgtctatttgctctaagagctcccagcaacatgtattaaagaagtttatgtgaatagtctaatgcacttgtgccgtggtcagaattattaccaagctaaaaaagattaatttttctaaatactctaaaccctcagacactattataaaggctacagctagtgccacatttctgttatcttggctgacagatccccaagtacacacacctccctgccacttctccctgttaaggcttaaacacacacacactcacatacagaggcagggaagtcatgggaagggggccaggcacccttgactagggttccccactcgagaccctgcctccctcacaaaatagagacgacctaaggaactgtggggagagctgggtatctcccagctccctctgagtgctggctggcacagagctaactcttggtccaagtttgcaaatgcttagctaacaaagatggcattatgcgaaagactggtgcacactgctgctctgggagttcaaatgaagtgaccactgccaaaaattttgtttgggtccccaccactccccccgccccacctcccgccttgaaataaagggcaaggatttgcaatttggggtcttgccgccacttgaaacccattaaggtggctgcactgctcgggtgctggcaaaatgcaactccagtttctcatttaatgtttaattagctaccgatggaggagtctggcagcctctggggttaagaggaattgcagaaaacagggcgggagcttaaagaggggctgcaacccaaagcctatgctccaaggggaatgggggagaggggaaaaagaagtgtgtatgttttgtgtttttaatctgccacacaagggtgccaagggtcagagccaaaggcaacgccgtgaacttgccaggacctctgggcagatagctagcctggcttatcacagggcagcacactcccccagctctttgcagcccagctgcaggccttctccacctattccagcctgcactgccaccctcttgtccccctcccccgaaagggttctggcaggcatggacactccctgcctggcaggaacctcagctcagcacatccaaggagagccctctcaaatatcactttgctatttcaaacccaccaaggacgctggacccctgccacacagccacaaatacctcagtgcctgcccacgcccatgactctggggcactttcctactttaaccaaccctcctcaaggcaaagtctcccctctgctgagggaggagtcagcagtcttgttggggtgggagagcagagtcttgctggagtgggaggacagggccagggagccagcctcactgaggtggagcacacaacagccaagatgaaagggaactcaggtcttcagagaaaggaaactgaggcaagcaaggaaaattcatcaaggtcatggaactccatgtccatttcactccccaagttcttcactgggaatcagagaggcctggggttggagcagctgtccatgagcctcctgaaaccatgcacaaagtcccctttatgagggctttctggaaatactgtccatagcttttatcacattttccctgccaaaagttaagagccgttgcaccacaacaaacccccttcccagagttcaggtctcgcctctgccagtgactccacaattcaccttgcgggggcttccgttcaattctgttaagttcatttcttcagtgaacatgtcggggggcaccaaccagcatacccggtgccaggtatgcttcaggtcaactgcaaatacctcccctctgttttgcagggattctttatcaagtaagtgtcaataaaagctgagaggcagaactagaaagatagaggatttctagtctcagctctgccaacacctggctgcctgcccttggacaagccacctaaactctagggttcagtttcctcatctgtaaaatgggagtgagattttgtaacaaaacccaaccgacgaggcagctgcaaagcccagccacaatcacacacatgaaaacatgttataaaaaagtacagcaggtatgtgtagtgtaagaatccattgctattctctagtctctttggctcaaaggccactcatttcttggccttccaaattccactcatttcttgacatcaaaaggaaaacacaaaattagctaccacatggagaaaaaggattgcttgttgtttgagaaggcaccaaagacacttccctgcaggtccaccctggagaaagtcaaagcggagaaggtggccaggacacctctgggcacacagttagagacactcatgcagctgaaagtgtccactctacaaaaggtcaggacccagacaacagtgtctaagagaacccaaagagatgccccaatgggatcccatgggcttttgtcaacactctgagatgcactgctctggcctgagggtaacagcaaggaaattacaatgggaccgtgaccctcctcccgtgaccctcctcccatgacccgggggacctcttctgatttaatgcaaaccaatttatcagaaaagtccactccagatgtgagttcccccaatgctcccgttgcccctgtaagcacttcctacccaccgaagatgggtctggtatccaggctgcacaaactccccacaccctgagaatctttggatctccttgatagaaaacagaaggtcagtcaacagacacttatttacactctacttgattttctaaaaagtagttaaggcaactagttaattgacttcaaaatcaccttgttcgagagcacccgcaacaattatgtctctaaaagaacaccattcaagactcactcacccgcaagtgacttactcattcttacctaactccttcatacaatcagcacgtgtgcctgctacatggaaggtactgtgggagctacagagatgaatagttcacggtctccaccatggaaaaaattaataggctgtcgcccgaaagacaaccctaagtgagaagttaggtggaatagtgccaacaaatggtacttgccatgggcctgcagggccaagccaggtggtgttagaaacacccattccagagtcagtcatgactccatgtgtgtgcattctaactaccacttcccagctgggaattaaccactgtgtgcctcagctgcttcatctgcaaaatggagtgaacaacaagccttctctcatcgggtctctggcaggatatgagggactgaacctacagcagttagcagagtggcctggcacacggaaagctgccaacagaggctttgtataggtggtttttatagatatggagatgaaggcgtgatcacagaatgcagaaaactatctcataagtcctccaagaaggaggtcttaaaagatgaataggatttgaatgggtaagagaggaatgcattccaggcaagaggaaggagtcagcaagaagctactgcaatcattctagcaagaaggaatgaaggttaactagactgtagccacaagaagggagagactagatgaagactggagaaagacaaaaagaaaagtgggctccttttcctaattttctgaagttcttcttagttttccacttgcttctctgctgtcacccctccaactcaatgctaccccttaacgccttcataatccccattcatcactccatccctcctcccacaggctctgactctcaggccacatgataccaggtggagcccaattcaaaaaaaaaggtttttacaccccacacatatgaagtgtaggcctcaattagggtgacctcatctcttagtagcatcttctaaatgtcaacgccaacctcagtgatctctatacatttctactgccattcctcagcaaattactgaaagcaaacccatgtgcaaactttcatggccgccatattgtttcaggatggaagacgacaccacaagttgccaaagactctcaaatttgtagagcaccgaacttggttaaaatcattaacttctctgaaaggtacaggcaaaaaatagcatagatatgctacatcaagagagtgaaagacccacccacccatccccagattctaaaatgaaactatttacatagcagtcaaaaactagcaacagtgttggctgttcacaggtttaggaaaaaaaccatgcaagatttttactaggtagaaaggtcaaattcatcaactatttttatatggctgtgtacctcttagcctccctgaacatccaggtcaggaaaccttatcatcaccatgggattttcccagaagaaccacatcataagtgaaccggtggtgacctctccctttcactaccatgcaagtttaccagaccagaagtaccattcatcagcttctctttttcagccctgaagagggaacaagaactgctcaatttcctcagcgttacattccaagagcattaacttttcattcacaacaaaactgcatcacattgaatattctcaaaaccagtaggccaccacctgagtctctaactcctcacattacaggagaaattttcaccatgaagacattggtgatcatgggatttgaccacttgtgaaataaccagatgggtctggtctcttagccaatttccacctccacatgcagggaactcagatggctgggccaagcaggtgggacccaatgacgttcaagaaaccaactcccaaggacccatggtttcccaggatcattcctacccactgcacacagaagagcaagaccattagatcacctgctatatggacatgcttaactgtctacagggctagcaagaagaactgaacagaggctatggaagaccttcagacacgtcctcttccatctccccaagacagatcctaacccatttcatcagatcatcaagtgtgactgcaacccaggtttgaaacccatgtttgtttttcctgaaggggactgctatgggagatgaatagatggcagacaaccctctcgtaataatttcataaatcttaagaaactcatccaggtagaaagtgagtaacagggtagaaagaactacaatctgatgttaactagcttcacaagaatattttggccacaagattatgaactagctgaggatctcagagtacaaatcgtcttagcagatacagtatgagcccacccacaccaaacacacacacacacacacacacacacccataatttgaaagatcgctctctggaaagtagagcaagagagtccattccaccaaattctcactcaactccaaaacgcaagtttcctattggcttttgtttgttacaatttcttcttaaaccaacactaaagaggcttagtcccctctcagctaactgtccactcttaacataagtctcacagttctgagtcctgtacaacaccatttaattctccggatagatatctacacaattttgcacaattacaacattatgaaacaccgttcaccaagttagaacactgctggagaaaggtaccattgggagggctgcagagaggtgggcaggggaacagaaagaaacgcaagaagcaaataaagaccactgcgaactggctgtgtttgcttttcgtactagagaagttagagctatccaaccctataattattgctaggattaaaaatatgttactcacataatcatgaaaggcttttgcttcacttgaatgttcacaagtgtctctcctttcaggagctgcacagtaaaggtcccaaaatacactgcgaggaggaaaataaaataaggtcaggttactaattattacttgtgtacacaagggcaagtgcacgatgcatggcgctaacagtactaggtctcccaaaggctcaatcccaccttatcagctctcattgggcaaacagcctagaaaacaaaacacgtccaacttcttctggcaagccagccattagtaatggcagtaatagttcttatatatcaaatacctactacatgccggatgcttcacacccgtattacttgtgtctaccatatactgtaaggtaggcaattttctctccactttacacagggggcaactgaagctccaaggggttagtagaacctactcatggatgccctaggaggatgaacgcaaatgtggacgagaatccatactgttctaatctgtttcctttttaccacccaaaccaaaatggctgcatatcctaaaaaaggttcaagtgccaaagtcagaacacaactatgattcatatatgccgcgatttggaagactctggcaataggaactttacaggctcttaatcccagagcccgcacctccacccttcccacctcacccccactcccacccaagccctccctcaaggaattcttatgcaagaaccactcctccctccatgcaccaaaaaacacaaatcagttaggcaaaggacaggtcatggacaaccaagtatccagtcctttcacattgcagtagagggccctcttcacagaagcacctgtcagcaaagggaaagaaggaagcaggcctagaaatgcctgcctcaccccccactaaagattttgtatggtcactccgacattctgtattaaaatgagaacagacatacaagtcctatgtcaaccaataaagccctattcaaacacggagttgtcagtgatattaacaagggacctaagaaactctccaaatcaggagcccgaggcccagggacagaacaagcttaaagggtaaagtgggcaccaaaaccaaagtcctactcctggtccactgctcttgtcctcgtcacaaacagccagctctgcaagtcatcagacaagcatctcactcaaggtgtgaataatgcagcctgcccctcaccagacaagctccactgcttcctcccgctggagaaagcctgggtcatttgctcagtgtcaaatcgcacaaaccaacttctaccaaacagggccacagccactcaaagccaccaccgcccgggcctaacacaacagactctacgttcctgcggctgagataaggatggagaagtttcaggagattctggatataacaggaaaatcaggacttctactagctgcagaggggggctggagaacattcctttctgtcttctggaactgtacacatctgcttacctcctccacacgttaaaggtttctaacactacaaattccccggccccttcactcataagcctaagtaaccttcaatcataaacctaagtttctacaagatccaagccgatcagagccgccaaccccatccacacactccctccaaaaacagccacagaaagcctatcacccactcctacaggtggaatccttccgccacacaaatgcctccaagaccggcagttccgaggttggcagaagtaattaaaaactcattttctctgcacaagttagaacagacacttcatcctcctgctgttctaagagacttaaaacagtaacctgagctggcagataaacccgctaagatcccaacgacaggagacaggacacaccgttttgctgaactccatcaaaatatcaaaagccactctgctttcttttctttttcaaaaggatgtcaaagactccaccagtcagtcccacaaaacacccgggtcatatacctagggcaactggctccggctgaccctgagctccctcctggctgtcatatacccaacacagagaccagacctgcggtggccccacacccaaaggacacagaggcctggttagagagtcacagagagtgggagcccctaactgcagacactgcgaggtcgactctgaccagttaaggttctgcgtaaaacaacactttgtggttttagtgggggaggggggcggggagctcccagaggaaaggaaggaccagtcagtctgaatcagtatctttaaaggaagtggcagccctttcttgctctttctcagggtgcctggaaaaagccccggtagatgtcctctcttaaggttgtgagctcccgaggagaaaaaggaagggacaggctagttgtaaaacagacctggtatcccctccacgccgccccacccccactcctctaattaaagcaacatgcagaattgacaaaaatcctccaatgttttttcaaaccccctgcctagagccccagagtgaaatgtaaaagtaaggagtttctaccccaacaccacagatggttttgtcgtttttccccccaaaactttaggtaacatcctcttccgcccttctcctccttggccagctgggccggagtgcctcgaggtgccccgctctgtgcaacgcagagggccacagggcggagggcctgctccaagcctcccttctttgttcacttggacccagggctcacaacaaaacaaacacacatgcaaaactatcacacaaacttaccaccaccacgagtgcaaaaacccaggcggttctcccaacgtgatgtttttttcccatcgaatctggaaaggtaagagcagaagcagcttagaggagcagagacggggtgggctgggggcttcccagagccaaaaggctaggaagaccaactaacaataaatgccaaaaggtgataaaaattcaaaatggtggccacagtggctgctcctgaaaacaaaggctctaagaatagtggggggggggggtgtcaagaaattggatgctggggggagtcccactcacctccgataagaaggtctgtgcagatttctgtgctcctacgtgcagtaaatattcgtagacgtataaagctaacctggaaagtggacagggggcaaagagagagagggaaaggcgtcagatcccaccggcgctctccaggaccttgccagcaggctttgagccctgtctgcgccgtcccattgtggccccgaccagaggtaagcagctagctcaccccaaacagggccgccaggtgcgaacagttagggggtggggaccagggaacgcgttacctcaagcggtgagggatggagagcagcccccaaacttgaacttccaagtggcgtcgcgggcaaacccacctaggttcctcaaactcgcaagccactcgaccccacagccaccttgcctttcccgacccactgctcgctacgctctcgccagctttggaggtccgaggagactcggccctggactccgggtgcttggcgcgctctggagagggcagcaaagcgccaccctcgtcacctccccccaaacaactgtgccccaagcctggggccaagccggcaccaccgtcgctgcccagcccggcgtccgaggacgcggagccggtgacgaagccgaggacagggaagggagagcgctcccggccgaacaaagcccccggcacgcactcctcacgccgcgggcggacaaaaggaggcttcggggctgcagaagccacgcgccccctgcccgcacccggtgggcaaagtgcggccaccgcggggagcgcccggctggggagaacgtcgaggctcgctggcgggacctcgcccaccactcaccgcgggcccccgcgctcgacccgcgccacggccaccaagtaccccctccggcggctccccccaccgccccttccccgatcccccaacctccgccggctcccaacaatgggctctcccacgccgcccgccgcggcctcggggaaggggccaggcaggcggcgcctggacccggggacccgagggcgcagcagcctccggcccccgcccgcccgcccacctgcctcccaccgcccgcccgcccgcagcccggcggcggcgcggccgccacttgcaaaatagggcttacttttcccgagcctgcccatccgagggcaccgccgagcctttgcctttggcaaacatggtttgcagggaagagggcgccgagcctcgccgccgccgccgccgccgccgctaccgctccggctctcccgagctgcccctcgctcccggccccctccccggcgctcgctcgctctctcgctcgctggcgctctcctcgccgcgctcccctccctcccccccaggcgctggctccgcgctctttccagctgtcaaagcgtcagccccggccgcggccccatcgccctggaactccttccgcgccggctcggcctgggggtgccgccgccgccgcccgcacggccgcccgctctccgctcgctcgcgcgcccgcccggctccgcctgcgccgccctctgcgcctccagcaccgctgccgccgccgccgccgccgccgccgctggtctacttggagctcaaccgaacgtggctacccgggcgagggagcgaggcgggcggcaacgtcccgcgatggatggccgcctcggccaatcggcgcacgcgggggcgggcccgggccggctgggagggacgccctgacagcgccggccgcggcagtccccgctgcggccgcctccgcggagccgctgcctgctcctgcaggcgaactgggggcgtccgggggcgcgagcctctctttctgtcgccggggcggtgggcgacgtggatcgggctgggggcaccctggtctcctcgccccagcgaggagggggatctgacccgcgctccccgcggcgtggaccactggggggctaggggggcgctgcggcagcgtccgatgggagggggcgcagacccccaagcggtcgccgctcgctccctcccgccccgtccctctcccttatctgcccctcagctcccccccgccgcggcccgcaccagcccagcccttatctcgccctccgctcttggttgtcctccccctaggctccgaccccgaccccctccccagactccagcccggcccccagcccgccccgcccccgggcctccctctcgcccagtctggcttccgagcgccgggcccggggctccacgctgagagctgggcggctcgagccggcgccgaggcgcgcggctgctcctttactagatcattaaaatactttggaaaaccccaaagtggagccgcgcgaaaatggcccttggcgtgctttggggagccgggggggaggggggctggggacaggggacttgaattaagaggagggagagtgatttctcccaaatttccaaggtttgccagtcttggcaagttagcccctcggcttctgcacgggaaagggtgccactcggagatggggggcgtcacctgggcggcccgcgacgcggaatgctcgccacagaaatctgcaaacttcaaataaatggagctaaattggggagtgaggggacgagagtcaggcgtagggggaggggaagcttccattgtcagtgacccaggtgtacaatgggaaattgaggggggggctggcagagtgacccagctatttgctgctgactcctttctgcccacgccgagaacccagaagacacactgcgtgcccctcattagggactcttaagaccagataccggcgaaataggggaaggctcccccattttcagactgtttttagagagcggatctctttaaatgtgataaaacactgtcggcactgtctctttaaaagagtcaagcagaaaaagctgtgtaagcgctgattggctgcctgtttggatacatctttaggggagccttgaaactgttagcctaggttgattttttttttttttttttttttttttttaactgcgctgttccaataaacaagtaacgcccctccccctaacatgcctcgcaccaaacaattaaaggataggtcagtgtcctggggaaaacacgtttcaagtaggaaaactcagaac

SEQ ID NO: 587 - DNA, 21743 bp, Homo sapiens
  source 1..21743: mol_type = genomic DNA
cgaaggagtatctggagggaatagctggggcccaaggagtatctggagggaatagctgtggcccaaggtgtatctggagggaatagctggggcccaaggagtatctggagggaatagctggggcccaaggagtatctggggggaatagctgcggcccaaggagtatctggagggaatagctggggcccaaggagtatctggagggaatagctaggaacttgaggcgtatctgaagggaatagctggggttcaaggggtacctgaggggaatagctgggaacctgaggagtatctggggggtacagctaggaacctggggagtgtctctgcagggagcagctgtggtgtaaggagcaccttgggggctggccctttgtggaagggcatctgtggcccagttctatccagttcccctgcccacccctcctgccctgcgccacaggggacacgctgatcgacggcggggagcattactgggaggtgcgctacgagccggacagcaaggcgttcggcgtgggcgtggcctaccgcagcctgggccgcttcgagcaactgggcaagacggccgcctcctggtgcctgcacgtcaacaattggctgcaggtcagcttcacggccaagcacgccaacaaggtcaaggtgctggacgcccccgtgcccgactgcctgggtgtgcactgtgacttccaccaaggtgaccccaagccccagctgccgtctctggctgcccctgcctgagtcccctccgtctgcccccatcccacttctgaccggtcccactgtcactctgccccccgaccccaggcctcctgtccttctacaatgcccgcaccaaacaagtgctgcacactttcaagaccaggttcacacagccgctgctgcctgctttcacggtgagctgccctccgcggcccagggggaggagagggtggtgctgggcgctggggtttgaagctgagcccctcccccctccccccgctgtccctcaggtatggtgtggcagcttccaggtgacgacaggcctgcaggtccccagtgctgtgcgctgcctgcaaaagcgaggcagtgctaccagcagctccaacaccagcctcacctaggcccccaggcacccacccagctggggtgtttttgggggagtcgccgccaagcccaggctgctggagccaggcaccctcctctgtcacttgctgcttggagccttaactccagatgggggggtcaccaagagggagtgggcaccctggcgggccctctccccacctcacctcttaataaaggtcagacactggccaggcgaggccgcggtgctggttctttgggcctgggtgtggcaccgggacctcatccttcccagctgtaaaatgggcttttctcacagaatatggtggtagatttcactgagctgagggtcactgggagtaaatggggccatccgtaggcagacatctgacggacccctcgtcccctaatcccccaagccaagccagacacatgggtcctggggtcagagttttaatcctgggaaaaagaatctggccgctgggccatgccctgggactagcccgctggtccctggtgtgtccgaatcagtgctccagtgcccgcctcttctccagcttcttctgtagctctgccgtcatgtctgccagccctgggggttcaggaccaggagctgcagctggctcagggatccccagtccatgcccaccgccctgacagccacccaggaccagctacagatttgcagggccccgtgcaacaggacagtgtgctcgaaggcattaagaatttcaagacagagacagcagaaccttaaaagacagggcgcttcggagtgtggggacttgtgtgactgtacggtcacacacctgggaagcccgccccgcactgaccccgcagaccccttaccggctgtggggaagagaggctgggctgaactgactggcagcttcctgcccaagccaccattaaagactttgggctctggaagagaagacagatgaggccaggtgtggtggctcacgccggtaatcccagcactttgggaggctgaggtgggtggatcacttgaggtcaggagttcgagaccagcctgggcaacatggtgaaaccccttctctactaaaaatacaaaaattagatggacgtggtggcaggtgcctgtaatcccagctacttgggaggctgaggcaggagaatcacttgaacccggcagacagaggttgcagtgagctgagatcgcgccactgcctgggcaacagagtgagactccatctcaaaacaaaaaacaacaataaagacagatgagctgggtgcggtggctcacgcctgtaatcccagcactttgggaggccgaggtgggcggatcacgaggtcaggagatcaagaccatcctggctaacatggtgaaaccccgtctctactaaaaatacaaaaaaaaaaattagctgggcatggtggcgggcacctgtagtcccagctactggagaggctgaggcaggagaatggcgtgaacccaggaggcggagcttgcagtgagccaaggttgtgccactgcactccagcctgggcgacagagtgagactgtctcaaaaaaaaaaaaaaaagtcagatgagggctgaggctggcctgccatcaggtgagggtgggatatgggggggaccccaacctggcttgggtccaacgggtggctttggaagcttggcaggaggctttggcaacttctttggcttcaggatgactggccaactagaggaagccactgcgtggacaaaagtgtaacgtgtcacatcagctgttaacctgtttccccaacccccagctctcagcagctctgttccccacccaccatcttggttctcatagtcaacagctgggccatctccaatgggggtcacgtagttctcttcctggttcggtagtgggggcagtgggggcagcttgtcctggctagacgcaggtgacagcggcttggggccacctgtgcagggtgcaggacctgatggggaaacgtggtcactgtcaagacccatgtcatacagggacaccttgcaggttggcgggggggtctgtgtgcatgcctggagacaggcatgtgtccctgtgtgtctgtgtgtgtgcccatgtataagtctgtgtctgggccgggcgcggtggctcacgcctgtaatcccagcactttgggaggccagggtgggcggatcacctgaggtcaggggttcaagaccagcctggccaatatggtgaaaccccgtctctactaaaaatacaaaaattagcttggcgtggtggcaggctcctgtaatcgcagctactcggggctgaggcaggagaatcgcttgaacctgggagggagaggttgcagtgagccgagattgcgccactgcactccagcctgggtgacagagcaagactccatctcaaaaaaaaaaaaaagtctttgtgtggcatacacgtgtacactaattgaatctagataagttaaagtgcaacgtttgtacacacacacctgtggtgtgtatacgtgtgtgactgcacgcctgctgaggtggctgctttagtccttgtctacatgagtgcgttttgcccgtgtatctacacgtgtccgagtttgtgccggtgcacggacgtatctgcatttatgtgtacacatgtgattgtggcatgacacaggtgtatctgtgctacatagcatttgtatgtgactggaattggggcacacgtgtatttatgcatgtgtgatctgttgtgcccgcacaagtgtgtgtcaccttctggctaggcaggtggccacagttgcatggatcatgcatgtgtaatgtgtgtgtggatgtggcacttgggggtccttgcatacgcccagaccagggaagaccagacaacccacgctacattcctttctagtgtgttctctgcctcctcttcccactccataaacaggaccgatttccacctctttcccaacacccacccggattctcggtccctgtggggctactgcttgtccgggtgtaccctctgacccctcaatgcccatttctacctaaggagatcctttgggaccatctgcaaagacccactcttctgggaagctttccctgctctgcccccatcttctcccgaactctaggcgcctcccccgagcccaggtttttcctccaccccaaattcaaccctacaggatgagagtgtctgtgtttagctctgtcccaagctgggacccccgccccctcccccacacacacaccctgacggcagggtctgagtcatttctgtccctgcaactttgggaacatcagatgcaggaggtgcagccaccaaactgactgagggggcgtggctgaatgcggggtcctcgatccctcccacctcggcccgcgggaagggggcgtcacctgggcccggagcggagggcgccacccacacattctcgccattctccttatcggcttccacgtagcctggaacagagagggcggcctggaggaagcgcggcggccaggggcggcccggtccgtccgagcgggggcgggagaggtgagcactgggcccccgaactccccgaaggggcacccacctagcaccttctcgtagtcctcgtctaacaggaatggcaccagcgcctttttggtatgcgacacgaaatagttgaccacggcgtccagggaggtgcaagagaactgggggcagatgggggagcggtcaggctgctggagaagggacgcggaccccacaaagtcacttctagggactctggcccaacgctcaccggctgttccacatcgatcacgtacttggggccctcccgcttcaccttgtaatgccggaccacgtgcgtcctgcaccaggagaaagcgagtgagtggctcagcccaggctcccacaccgcccctcagggaaggccccgccccaactccaggctccgcctccaatagaaacaggtccatactggctccgcccccacagaaggccccgccactgactggttccaccccataaaggacctaagccccgttgacctcccggagcactgactgcccgatcccagcactgctcccagcggggaccaggcccgaccgacccacccccacagaagaccccacctctagtcttggcaccacctccagcgagggaccaggccagactgacaacaccctaggaaaggtccgcccctaattctggcaccgcgcctagggagaaccaggccctaaagaccccgccccaggtaggccccgccccctgtaatggctccacccccaggcaccgactctaccttctacatcgccttgcccaaccctggactgggcttgagaatttggcataaggctctgacttcgcccccagggctggctccgcctccatagccctactcaacttccaaaaaggatcacggccatgactcccccccgtagatcctgacgctgcccaaagagcccattcccatccctggatttgacttcatcccctccagtggcccagacctggcccctgcgtacctgacgttccggaggggccgatcctaacctaggagtctgactccacctacagggagtcccagctcctaacccaagacctggctcttcctgcaaaggagtcggcctgggctctaccttcttccctaggcattaaccccatacctggggcaaggccagcctcaggatcccacgaccccggagctctgatcccgcccccagccctccctgcccagctctgactccgcccccatgctcccctgcctagcattgactccacccctcccccagcccgcccaccccagctctgactccgccccaacacgcccagcgtagctctgattccgccaccagtgtactctgctcagctctgactccacccgccccagctcgcccagcccagctctgactcctcccccaatccgcccagcccagctctgactcctcccccaatccgcccacctcagctctgactcctcccccaatccgcccagctcagctctgactccgtccccagacgcccgtctcggctctggctccgtcccctggcctacccactagcgggtcggactccgcccctgcttctgaccacgcccccgcgcccaccctcttcccaccctcctcccacccagggctctccagacgcgcatgcgcacccgttgtgcatctgccgcgtggtgaccgacacgccgtcggcgccgtccccgctgggccgcagcagcaggttcccgcactcggggtagcgctccaggagcagttgtgcctccagccggctcaccttcaggaagcacctgtggcgggccgcgtcacccactcgggaccccggagaccaagtccgctcttctgcacgtaaaccctgcctcctctgagacccagccccatccccatcccctaggcccaggagaccctgccctgctctccagacccaggcccctcccacggagacccagtccggccttccaggctcctagtttttgtggggttttttgttttttttttgagacagggtttcgctcttgttgcccaggctggagtgcaatggcgctatctcggctcaccgcaacctccgcctcccgggttcaagcgattccccttcctcacaggcccggctaatttttgtatttttagtagagacgggatttctccatgttggtcaggctggtctcaaactccctacctcaggtgatccgcccgcctcggcttcccaaggtgctgggattacaggcgtgagccactgcatctggccgggttttttggttttttttttctttagagatggggtctcgctatgttgcccaggatgggtctcgaactgggtaaaagcaatcctcccgcctcgacctcccaaaacgctgagatgacaggcgcgagccaccgcggccagccaggctcttaattctggccccggagatgcagctccaacccctagggagacccagccctgcctcgtaggcacctagagcctcccctggagatcctgtcccgccctccaaacacctagaccttaccctggaggccctgcccgcctccctgatcaccaagaaccgcccacaaagacgatgctccgccccccatccaggccccgcctctagggtcccggttaccctctccgacaaataactcctccccggagacgaagcatcaccttctagacacctagactgaccacccccagaccctgtccctactcctcaggcctaggccccgccactgaagaccttaccagtcctctaggcccctagacccgctcctggagatcctgccctgcctccccagcatgggccataactccccctccccctcccccacccccagccccaaggcagtcctcatgcaaaatccaagacccaactccaggggacccaactcaccgcccaccctcagccacacaaccacctcccgtccccatcctgcagcccctcgggacaggcgggacactcacgagggtgtctccagtgcacggcgcgcctcctctttggccaagacttcagacatcatgtataggtgcccaggaagcagggtcaagtcggtcgggacacggagctgaggggcgatcgagggacagtgactgcacctggccagccgggaatggacggctgtgcccaagtcacagagtggcaaattgaggccagagctcagagcaatgaactctgacaccttagagggcaaagagggcttcgagagggttgcagaggagtgttgcatgagagtagatgctggggccgggcgcggtggctcacgcctgtaatcccagcactttgggaggccgaggcgggcggatcacctaaggtcaggagttcgagaccaacctgggcaacatggcgaaaccccgtttgtactaaaaatacaaaaaattagccgggcgtggtggcagacacctgtaatcccagctactcgggaggctggggcaggagaatcacttgaacctgggaaggcggaggctgcagtaagccaagatcacgccattgcactccagcctgggtgacagagtgagactccgttccccgctccccaaccccaccaaaaaaaaaaaaaaaagtagatgctggaatctagggtctcaaactaaagtctgcaggggccaggcaggtctcaaactcaatggcctgccagggtgaggtaggaaacagggaaatcagagggaaatcaggaaggtagactaaaattcccggttgataaatgatgtcagctaattttttttttttttttttttttgagatggagtttagttctgtcaccaagctggagtgcagtggcgcgatcttggctcactgcaacctccgactcccgggttcaagccattctcctgcctcagcctcccgagtagctggaattacaggctcccgccaccacgcccagctgatttttgtatttttagtagagacagggtttcaccgtgttggccaggatggtcttgatctcctgacctcatgatctgccagcctcggcctcccaaagtgctgggattacaggcgtgagccaccacgcctggccaatgtcagctaatttttaaaaacttagcactctgtggccaggcatggtggctcacatctataatcctatcactttgggaggccaaggagggtggattgcttgagcacggaagttggagaccagcccgggcaacatagtgagaccctgctctacaaaaaaatttttaaattagtcagatgtggtagtgtgtgtctgtatcccagctacttgggaggctgaggcaggaggactgcttgagcctgggagttggaggctgcagtgagctatgatcacaccactgcactccagcctgggcaacagagagagaccttgtctcaaaaaaataaaataagaaatacggttggtcgctgtggctcacgcctgtaatcccagcactttgagtggccaaggcgggcagatgactcaaggtcagttcaagaccagcctggccaacagggtgaaaccccatgtatactaaaaatacaaaaattagccaggcgtggtggcggacgcctgtaatcccagctactcgggaggctgagtcacaagaattgcttgaaccggggaggcagaggttgcagtgagctgagaacgtgccattgcactccagcctgggcaacagagtgagactctgtctcaaaaaaataaaacaaaattttggccgggcccggtggctcacgcctgtaatcccagcactttgggaggctgaggcgggtggatcacgagttcaggagacagagaccatcctggctaacacagtgaaaccccgtctctactaaaatacaaaaaaattagccgggcgtggtggcgggcttctgtaatcccagctactccggaggctgaggcacgagaatggcgtgaacccgggaggcggagcttgcagtgagccgagatcgcaccactgcactccagcctgggcgacagagcgagactccgtctcaaaaaaagaaaaaaagaaagaaagaaaaaggaggctttttgaggagatctggagaatgggagagagggcgcagagagccactactcttacctccaccaccgttaagatgaagcctttccacatttcccgacactccaaggtctctacctggggaacaaaagaaaggaaagaatccaagtcagtgagcctcagtctactcatcaatgaaattggactagggaagagtccctgcttcaaagggccgttttcttttttctttttcttcttttttttttttttttttttttttttgagatggagtctcattcttctgtcgcccaggctagagtacagtggcgcgatctcagctcactgcaacctccacctcccaggttcaagcgattctcctgcctcagcctcctgagtagctgggactacaggcatgcaccacctcgcccagcttttttttttttctcttagacatgagggtctcgctttgttgccaggctggtcttgaactcctgggcccaagctatccttctgccttggcgtcccaaagtgctcagattacaggcatgagccaccatgcctggctgatattatgatttttgatgttattatatcaacatttgaaaaacatagatcaggctggatgcagtggctcactcacgcctgtaatcccagcactttgggaggtcgaggcgggaggatcacttgagcctaggggttcaagaccagactgggtaacatagcgagccccctgtctctacaaaaaaataaaatattagccaggcatagtggcatgtgcttggctgaggtaggaggatcgatcgcttgagcccgggaggtcgaggctgcagtgagctatgatctcactactgcactccagcctgggcgacgagcaagaccctgtctcaaaataaaataataaataaaataaaataatagaaaaacatagatcagttcccagacctctcatgctctaaaccctcccataggccagccaccgtgactcatgcctgtaatcccagcactttgggaggccgaggtgggtggatcacttgaggtcaggagttcgagaccagcctggccaacatggtgaaaccctgtctctaccaaaaatacaaaaattagctgtgcgtggtggcacacgcctgtaatcccagctactcgggaggctgaggcaggagaatcacttaaacctgggaggcagaggttgtagtgagccaagattgcactactgcactccagcctgggtgataagagcgaaactcaaaaaataaaaataaaaaataaaccctcggctggacacggtggctcacgcctataattccagcagtttgggaagccgaggtgggtggatcacctgaggtgaggagttccaggccagcatggccaacatggtgaaaccccatctctactaaagattcaaaaaattagccaggagtggttgcgtgcgcctgtaatcccagctacttgggaggctgaggcaggagaatcacttgaacctgggaggtggaggttgcagtgagccaagatcgtgccattgcactccagcctgggtgacagggcgagacttggtctcaaaaaaaaagtaataaaataaaataaaataaaccctcccatagcacccagctcctttggggtcaagacccaagtcttacccagggcccacagggccctgtactacctgccccttcgtggttggcacaatggagggtaggagcatttgagcatcttctgcaagcaccgcccctctgcacccctccagcaagggacctaccttgaacttgatctcctgatcccggagaatcaggctgaagtgggtgccagggtcacgtgagcttccccagggaatctcatctgtgagtttctcaaatgctcccaagttgagcttctccacgtgctgggggcatagaagcaggggatctgggcaccagttccttggcctccaggccccctggatgatgtagcagccaccttgaccacaccatctacattgtctgcttggtctctgggctcaagggaaggcctgctctggagcctccattcccatccttacctggaagtcccgattgctattgtagaaataaatggtgagaccctgcaggcctgcccagaacttcttgtaatcctagggaccagaagtgcagaaagaagaggtgagctggccaagctgagtgcctttcatgtactcaatcctgtctcggggcctttgcactggttgtgctctctgccccacgctgcccccagatctttattacctcctgccttgagtttctgatcaaatgtaccttctcagggagatcctccccacccatggcccagcttctgggtgtctgttttcgtctgagaaaggaccagacggaacctcgatgtgatgagggattcagagcaacccccgccaatctatagagatgggtgctctaggggtaagttaactaactggtttaatggtatcccattcatctttcatcatccagctacccactagccatctatctatcatccatctgtccatccgcccacccacccattcatccatccacctaccattgacccatccattcacccattcatccatccatccatctgcccaccatccatccaccaatccgtccacccacccacccatccacacatccatccatccagttattcatccacccacccacccattcatccatccacctaccatttacccatccattcatccattcatctatccatccacccactcatccatccgtccatcacccccatccatccatctatccatcatggagccattcatcatccatccatccagtcattcatcaatacctacatcacccaccatccatccagtcatccatccacccacacatccatctgtccacccatccatccatccctccatcatccatccactcatccatccacccactcatccatccatccactcatctatcaatgcatccctccatccatccacctactcatccatccatccacccatccatccatccctccataatccatccatccatccactcaccgtccatcatccatccacccactcatccatccacccactcatccatccacccactcatcaatccatccacccatccatccacctatccatccatccctccatcatccacccaccatctatcatccatccacccactcatccatccacccactcatccatccatccatccatacatccatccactcatctatcaatgcatccctccatcatccatccacctactcatccatccatccctcatccatccatcatccatccatccactcatccctccatcatccatccacctactcatccatccatcatccatccatgcattcatccattcaccatccacccacccacgcatcttcccgttcatccatccatacatccctccatcgtgcatccacctattcatccatctatcattcatccatgcacttgttcatccatccatcatccacccacccacccgtctgcccactcatccatccatccactcccccatccatccatccacccacttgtatatgcactcatccatccacccacacatcctctcagccaccatcaagcccgcatgtattcaccaagcctccactcatccccccatctacccatccacctgtccatccgtagacacaagcacagatacacacatgcatttacctaacatttactgaaggctttttatgtgccagccctgctccaggcactgggactagagcaatacaggattaaacactgtattgcttcattatgtacccacgatgtgctgttgggcaagttatttgagctgtctttgtctgtttccccagctgtaaaatggtgataataatggtgccaactctggaggatctcatgagaattaggtgactttccacatgggaagcaccagggcctgcgttgagtcaagtcctcaacacgtgaactgtgactacagccctaactccctatttcagaagacagaaaactaaggctcaaagattaagtcacttgcataaggcctgggagtaaggaaagtgtggagccgggattagaacctgggtcttcttaattcgggcccatgatcttttttgttttgttttgttttgtttttaagagacagagtcttgctctgtcgcccaggctggagtgcagtggtgcgatctcggctcactgcaacctccacctcccagttcgagccattctcctgcctcagcttctcaagtagctgggattacaagtgcgcaccaccacatccagctaatttttgtattttttagtagaggtggggtttcactatatgttggccagggtgttctcgaactcctgacctcaagtgatccgccggcctcgccctcccaaagtgttgggattacaggcgtgagccactgcacactgccttttttttttttttttttttttgagacagagtctcactctgtcacctaggctgaaatgcggtggcaccatctcagctcactgcaacccccccgccccagttcaagcaattctcctgcctcagcctcccgagtagctgggattacaggtgcacaccaccacgcccagctatttttatttttagtagagatggggtttcatcatgtggccaggctggtcttgaactcctgacctcaagtgatcctcccacctcggcctcccaaagtgttgggttacaggcgtgagccaccacgcccggcccccattatctttcttttcttttttttttctttttgtttttgagagcagtctcgctcttgtcccccaggtttgagtgcaatggcttgatcttgactcactgcaaacttcgcctctcaggctcaaatgattctcctgcctctgcctcccaagtagctgggattaaggcgcctggcaccatacccagctaatttttgtattttttagtagagacgaggtttcaccatattggccaggttggtcttgaactcctgacctcaggtgatccgcctgcctcggcctcccaaagtgctgggattacaggcgtgagccacaagcccggcctcccccattatctttcttaactgcagtgatctactggctctaaagggtttgttggttggggaggatttggatgtatggaggtagaaggaaagtctactccactacaggtaagggaacctcaggggcagaggcggggacatgggcagggaggagctgggggtgtttgttttgatctgtattagaaaatgaggcagtcatggtggctcacacctctaatcccagcagtttgggaggctgagacaggaggatcacttaaggccaggagtttgagaccagcctgggcaacatagcaagaccccatcttttttttttttttgagacggagtcttgctctgttgcccaggctggagtgcagtggcacgatcttggctcactgcaacctctgcctcccaggttcaagtgattctcctgcctcagcctccagagtagctgggatcacaggcacgcaccaccacgcccggctaatctttgtatttttagtagagacggggtttcaccatattggccaggctggtctcaaactcctgacttcaggtgatccacctgcctcagcctccctaagtgctgggattacaggtgtgacccactgcgcctggccagcaagaccccatcttcaaaaaaaaaaaaaaaaggctgggtgcggtggctcatgcctgtaatcccagcatttagagaggccgagacaggtggatcacctgaggtcaagagttcaagaccagccgggccaacaaaatgaaacactgtctttactaaaaatacaaaaattaggtgtggtggtgcgtacctgtaatcccagctactcgggaggctgaggcacgagaatcgcttaatcgtttgaacctgggaggtggaggttgcagtgagccgagatggtgccactgcactgcagcctgggtgacagagtgagactcagtctcaaaaataaataaataaaataaaagccagaagaggcagtgcatgcctgtggtcccagctactcaggaggctggggcgggaggttcacttgagcccaggagtttgaggctacagtgagccatgatcgtgcccctgcactctagcctgggtgacagagcaactctgtctctaacaaaaagaaagaaagaaaatgaatatgcggcattgggaaggagagatagggcctcacggggaacggaggggctgggactttattctgagggagacataagcacacacacacacacacatgcacgcactgtccatggcaactatctgtcctgtggaatgtggcccccgctagctcttactgtcctcacatgtcacctgtcctggccttcgccccagcagctgaggttcacggagtttttcctgggctgggagcgggaggaagctcgggagtcagaggactccccatttcctggaggaagtccctgatcttgtttgtattcaagagagtgaacgagagacaaaagcaaagattgagacaaagagagagggagactgagacagacatcgggagagacagacggggccagggagagagaaagagaaaaagaaaccaaattcaaagacacacggagacagagatagacgcacagagaggcagatggccagaacccaccccagtcccccagcacgtgtcctgccccatccagcacccaccccgcccccccttggcgagtggggagacagggactcagagaggtgccgcagctccccacggtggcccagcagggccagcccccgcctccccaccttacccggtcacagggccccttcttctctagaaagctctcatagtagtgtgaaggcaggacacccttaggcttggggacacggggtggcctcagggcagaggccatgacggagccagggtcttccgcctggcctctccttccagtgggtgccccagctgggccgggaagctgagaaacaggtttcaggggagtttcctgtgtcagcccgtcaactccctcccctgccagggctgggcagaggctgatcccagcaggtccagtgatcctagggaaatccccgcctctccggtgtggaactgagaacagagagaatgtataagtctacttgaatgggagaataatcttcgctatatctgcaaagacagagacatggtctgtctctttatttatttatttatctatttttcctattttgagacagagtttcactctgttgcccaggctggagtaaagtggtatgatcttggctcactgcgacctctgcctcccgggttcaagagactgcgctgcctcccgggttcagagactgagtccaagctcagtctcctgactagcgtggattgcaggtgaccgccaccacgcctggctaatttttgtatttgtagtagagacgaggtttccccatgttggcccaggctggtctcgaactcctgaccccaagttttctgcccgcctcagcctcccaaagtgctgagattacaggcatgagccaccacacctggccctttctcttactttgatggaccctaatgattacattgggcccacctggataatccacgctactctccctattttaaagtcagctgactagcaactttaatttcatctgcaatttttcttttttagacggtgtctcattctgttgtcgatgctggagtgcagtggcacgatcatagttcactgcagccctgacctcccaatctcaagcggtcctcctgcctcagccacccgaagagctgggactataggtgggcaccaccacacccagctaatttattttccttttttaaggatgagttctcactatgttgcctaggctggagtacagtggggcgatcatgactcactgtagcctcgaccttacaggctcaagtgatcctccagcctcagcctccagagtaggtggtactacagttgcatgccaccacacctggctaatttttttttttcttttttttgagacagactctcgctctgtagcccaggctggagtgcagtggcgtgatctcggctcactgcaagctccgcctcccaggttcatgccattcgcctggctcagcctcccaagtagctgggattacaggtgcctgccaccacgcccagctaatttttacacttactagagacaggttcttgctatgttgcccaggctggtctttttttttttttttttttgagacagagtcttactctgtcacccaggctggagtgcagtggagcgatctcggcttactgcaacctctgcctcccaggttcaagcaattctcctgcctcagcctcccgagtagctgggattataggcacgtgccaccatgcccagctaatttgtttgtatttttattttagtagagatggagtttcactgtgttagccaggatggtcttaatctcctgaccttgtgatccacctgcctcgacctcccaaagtgctgggattacaggcataagccaccgtgcccggccctcaggctagtcttgaactcctgggtgcaagtgatcctccagtctaggcctcccaaagtgctggggttacaggtgtgtgccactgtgcctggcgtctatctttaatcttcaaatccctttgccacgtatcctaacgtattcacagattctgggaattagggcgtggatatctttaagagaccattattctgcctaccacagcctgtttaatatggtggacaattgattaattttgaatactgaatcagtcttgggtccctggagtaaaccccacttgtcatggtgtataattcactttatatattgttaaattctactttgtaatattttgttaaggatttttgcacgtcttcatgagggatatggggtgtagcttgctttctttgtaccgtctttatctggttttggtatcagggtcatagttccataaaatgaacagggaagtgtccccttcaattttctggaagagatgatgtgaaattggtgttaattcttctttgaacctttggcagaattccttagtgaaaccatctgggtctggagattgcttttttgggagtttttaaattacaaattcaatttccttagtagttaccagggctagactttgtatacatagcagaacaggtgttctagaaatcacagaaaggccgtgggactgtggcaatgtgttcatccactgaactgtctgataaagttgatagtatcagctatactaagtaaggtcagagagttgatttttgtttcgtttttttgtttgtttgttttttcagacagggttttgctccttttgcccaggctggagtgcagtggcatgatttcggctcactgcaacctccgcctcccgggttcaagcgattttcctgcctcagcctctggagtagctgggattacaggtgcctgccaccacccccggctaatttttttgtttttattagagatggggtttcaccatgttggtcaggctggtcttcagcttctgacctcaagtgatcccaaagtgctgggattacaggcgtgagccactgtgcccagccagggtggttagtttttattgtatttgtctaaggcaatgtggagcgacagaaggatttacagcatgagaggagggcagggtgcggtggctcacgcctgtaatccaaacactttgggagcccaagtgggaagattgcttaaggccaggacttggagaccagcatgggcaacatagtgagatccccttcttttacaagaaaattaaaaattagccaggcatgctggtcacgcctgttgtctcagctactctggaggctgaggcaagaggatcatttgagtccaggaggccaaggctgcagtgagccatgattacaccaatgcactccagcctgggagatagagcaaggccctgtctcgaaaagaaaagaaaataggctgggcgcagtggctcacacctgtaatcccagcactttgggaggctgaggcaggtggatcacctgaggttgggagttcgagaccagcctggcaaacatggtgaaaccccttctctactaaaaatacaaaaattagctgggtgtggtgatgtgcatctgcagtcccagctaattgggaggctgaggcaggagaatcgcttgaacctggtaggcagaggttgtagcgagccaagatcttgccactacactccggcctgggtgacagagcgagactccgtctcaaaaaaaaaaaaaaaaaaaaaaaaaaaaaaagaaaaaagaaaagaaaagaaaacaaaataataatatgggagggaggtggtaataggtgcattttagaaagagccctctggggcaatggtggaagaccgacagggtggggcatgagtttggaggcctgagactcactgcgatggccaggatttgggtgcaagaggctggaggtgtggctcagggttttggaaggcaggggacggaaaaaaagccaaagagaaagtgcgtaaggagttggggaaataaactgaggccggtttgggctatgctgagtctgcaggccttggggatgcccgttgttggctggacagtcagggtggggcccctaaagggtgcctgggctggacaacaatagttcacatgtacccagctcttgctctatgtcaagtcttcttcctgagaacattcccgagcaccctggagagcctcccccgcacccctactgtccagttcccacttcccgactgcggtctgggcaaagccacccgcacttgagcccatcccacggcgtcccggagctttaggaagtccccatcccggactttcaaccctgccagggactgagggaaatcccagagcctgggctccgggacgaaggtcccaggacagggtcggggatgtagttgcagaaacagggtaggggacaaaggccggggctgcactgatcaggcgcgcaacgagcccggccctgcctcctgctccgcccaagggtatggagggccggactcggctggccttatacccggagctgattggctggtgagtccagtccctgcctctgatggtttgcgctcataactaagggtttctactgattggtttacatggacgtctgcccattggtcaaatccgagttggtgtaatcagatagttgacacggattggttggtgcgggaatccagtagcttgctatcgattggttgagggtgaaataaatgggactcttatcattggctggcgggctccgcaacggtccaatcatgtaatcagtcgagggccgcccgggagggtgggagttaattctttagcgactgaggccggcttgggctctttggctccacctgtgtctgcgcgaggctgttccctattggagtccgcattgttcccctggacctgagtttctcccctggtcctaaaggccgaggcctctgagttcctcaagtgcggtgaccgcaggtctcaccttctcctctccttgcagcaggctgagccactcgcgcacccgccccaggcttccaccttgcaacctctatccctggacagcgaggcctcagtttccccattcgcaccaatgagctcccggtcaacaccccgtcacgcctcagtttcccgaatgttcccagagggctgagttcccgatctctctcccgcgtgggcatccccgaggcctcagtttctccgcccaccccagcgcgccgagcccttcccccgaccccggcgacggccaatggttggggcgcccctcccctccccggggcggggccgcgtgacgtgccgggaagccggagtctagagctccgggcgcggggaggcgcggccatggcaggtacggcgggcccagcggggcggaggcgcggggcgcggggctgcaggggcgcggggctgcagagccgtggggcgagcggcctccctgcagcctctcgctgtccgcagctccggagccgctgtccccggcgggcggtgcgggcgaggaggcgccggaggaggacgaggacgaagcggaggccgaggaccctgagcggccgaatgcgggagcgggcggtggacgcagtggcggcggcggcagtagcgtcagcggaggaggcggcggcggcggggccggggcggggggctgcggcgggcccgggggcgcgctcaccaggcgcgcggtcacactgcgggtgctcctcaaagacgcgctgctggagcctggcgccggggtgctgtccatctactacctggtgagcaccccgcctccctcgtcccatcgcggctcgggcaggaaggggaaactgaggcctggagttcccttgctgcaggacaagcttcagtgtagggaggggacactgaggcccggagctcccttgctgagagacgagccccggtgtggcgaggggaaactgaggcccggggctccgttgactgcaggaagagctccagtgtgaggaggggaaactgaggctcggagctctcttggctgcaggaagagccccgacatgaagaggggagactgaggcccggagctcccttggc
